(19) United States
(12) Patent Application Publication
(10) Pub. No.: US 2020/0332272 A1
(43) Pub. Date: Oct. 22, 2020

(54) SYSTEMS, METHODS, AND COMPOSITIONS FOR TARGETED NUCLEIC ACID EDITING

(71) Applicants: THE BROAD INSTITUTE, INC., Cambridge, MA (US); MASSACHUSETTS INSTITUTE OF TECHNOLOGY, Cambridge, MA (US); PRESIDENT AND FELLOWS OF HARVARD COLLEGE, Cambridge, MA (US)

(72) Inventors: Feng Zhang, Cambridge, MA (US); Mohammad Pirmoradian Najafabadi, Cambridge, MA (US); Qiang Pan-Hammarström, Cambridge, MA (US); Jonathan Gootenberg, Cambridge, MA (US); David Benjamin Turitz Cox, Cambridge, MA (US); Omar Abudayyeh, Cambridge, MA (US)

(73) Assignees: THE BROAD INSTITUTE, INC., Cambridge, MA (US); MASSACHUSETTS INSTITUTE OF TECHNOLOGY, Cambridge, MA (US); PRESIDENT AND FELLOWS OF HARVARD COLLEGE, Cambridge, MA (US)

(21) Appl. No.: 16/756,134

(22) PCT Filed: Oct. 23, 2018
(86) PCT No.: PCT/US2018/057179

§ 371 Date: Apr. 15, 2020

Related U.S. Application Data
(60) Provisional application No. 62/576,052, filed on Oct. 23, 2017.
(60) Provisional application No. 62/643,666, filed on Mar. 15, 2018.

(51) Int. Cl. C12N 9/22; C12N 9/78; C12N 15/113; C12N 15/85; C12N 15/10; C12Q 1/70; A61K 48/00; A61K 35/17

(52) U.S. Cl. CPC C12N 9/22; C12N 9/78; C12Y 305/04004; C12N 15/113; C12N 15/85; C12N 2310/20; C12Q 1/70; A61K 48/0066; A61K 35/17; C12N 2800/80; C12N 15/1079

(57) ABSTRACT

The present disclosure provides methods for inhibiting intra and inter-cellular signaling pathways by modification of post-translation modification sites on select target RNA molecules. In certain example embodiments, the present disclosure provides methods for inhibiting intracellular phosphorylation of serine, threonine and tyrosine residues by editing the genetic codon of these amino acids by means of site-directed RNA editing or RNA molecules. Embodiments disclosed herein further provide methods of inhibiting pathological activation of cell signaling meditated by post-translational modifications, such as phosphorylation, which are involved in many diseases, including cancer, immunodeficiency, infectious diseases, inflammatory disorders and neurodegenerative disorders.

### CROSS-REFERENCE TO RELATED APPLICATIONS

[0001] This application claims the benefit of U.S. Provisional Application Nos. 62/576,052, filed Oct. 23, 2017, and 62/643,666, filed Mar. 15, 2018. The entire contents of the above-identified applications are hereby fully incorporated herein by reference.

### STATEMENT AS TO FEDERALLY SPONSORED RESEARCH

[0002] This invention was made with government support under grant number IMI10049 awarded by the National Institutes of Health. The government has certain rights in the invention

### REFERENCE TO AN ELECTRONIC SEQUENCE LISTING

[0003] The contents of the electronic sequence listing (“BROD-2362WP_ST25.txt”; Size is 1,540,889 bytes and it was created on Oct. 19, 2018) is herein incorporated by reference in its entirety.

### TECHNICAL FIELD

[0004] The subject matter disclosed herein is generally relates to systems, methods, and compositions for targeting and editing nucleic acids, in particular for programmable silencing of post-translational modifications occurring at one or more target loci.

### BACKGROUND

[0005] Genetic engineering technologies for regulating intracellular target-gene functions and/or expression have been widely used in basic research and medicinal and therapeutic applications. The purpose of genetic engineering methodologies is frequently to regulate the function and expression of intracellular proteins involved in biological processes of interest. Recently, several genome-editing technologies have made it possible to manipulate target-genomic information. In addition to programmable regulation, the most significant feature of genome alteration is that it can provide a permanent change to the targeted cellular gene. While this permanent effect can effectively control target-protein features, such methods may pose health risks if an error occurs.

[0006] In contrast to DNA, messenger RNA (mRNA) is a transient cellular molecule. mRNAs possess genetic information that determines the functions and expression levels of the encoded proteins. Hence, RNA-targeted genetic manipulation is capable of controlling target-protein functions, similar to genome editing, but without the risk of damaging the original genomic information. Biological tools such as siRNA and miRNAs are well known and established tools in research and therapeutic areas. In addition, RNA editing, which is the enzymatic post-transcriptional modification that alters the transcribed RNA sequences, also has great potential as a versatile tool for biological, medical, and drug-discovery research. One of the most important and well-studied post transcriptional modifying enzymes are adenosine deaminases acting on the RNA (ADAR) family enzymes known for RNA editing activities. ADARs are known for catalyzing the hydrolytic deamination of adenosine into an inosine (A-to-I), the residue is then interpreted as a guanosine (G) in translation. ADAR family enzymes are mostly binding to double-stranded RNA. ADAR has three family members, ADAR1-3.

### SUMMARY

[0007] In certain example embodiments, an engineered, non-naturally occurring system for modifying post-translational modification sites on proteins encoded by target RNAs comprises at least three parts; a catalytically inactive Cas13 protein, or nucleotide sequence encoding said catalytically inactive Cas13 protein, a guide molecule for the catalytically inactive Cas13 protein, or a nucleotide sequence encoding the guide sequence, and an adenosine deaminase protein or catalytic domain thereof, or a nucleotide sequence encoding said deaminase protein or catalytic domain thereof. The adenosine deaminase protein or catalytic domain thereof is covalently or non-covalently linked to said Cas13 protein or said guide molecule or is otherwise adapted to link thereto after delivery of the system to a target tissue or cell. The guide sequence is configured to hybridize to a target RNA sequence comprising an Adenine or Cytidine encoding an amino acid that is post-translationally modified upon protein expression. The guide sequence comprising a non-pairing nucleotide at a position corresponding to said Adenine or Cytidine resulting in the formation of a mismatch RNA duplex. Formation of the RNA duplex provides a substrate for the adenine deaminase to modify the adenine, or in the case of certain variants disclosed herein, the cytidine to an inosine or thymine respectively. When the guide molecule targets the adenine deaminase to a codon encoding a protein that is post-translationally modified, the modification may be used to encode an amino acid that is no post-translationally modified, thereby silencing the post-translational modification.

[0008] In certain aspect, the present disclosure includes an engineered, non-naturally occurring system suitable for modifying post-translational modification sites on a protein encoded by a target RNA, comprising: (a) a catalytically inactive (dead) Cas13 protein, or a nucleotide sequence encoding said dead Cas13; (b) a nucleotide deaminase protein or catalytic domain thereof, or a nucleotide sequence encoding said nucleotide deaminase protein or catalytic domain thereof; and a guide molecule comprising a guide sequence designed to have a degree of complementarity with a target sequence at one or more codons that comprises an adenine or cytidine and encodes an amino acid that is post-translationally modified; wherein said nucleotide deaminase or catalytic domain thereof is covalently or non-covalently linked to said dead Cas13 protein or said guide molecule, or is adapted to link thereto after delivery.

[0009] In some embodiments, the guide sequence comprises a non-pairing nucleotide at a position corresponding to said adenosine or cytidine resulting in a mismatch in an RNA duplex formed. In some embodiments, the system comprises a particle delivery system comprising a ribonucleoprotein complex comprising (a), (b), and (c) encapsulated within or otherwise attached to a delivery particle, the delivery particle further optionally comprising a tissue-specific, cell-specific, and/or cell compartment-specific targeting molecule. In some embodiments, the system comprises a vector system comprising one or more vectors comprising: (i) a first regulatory element operably linked to a nucleotide sequence encoding said guide molecule which comprises said guide sequence; (ii) a second regulatory element operably linked to the nucleotide sequence encoding said dead Cas13 protein; and (iii) a nucleotide sequence encoding the nucleotide deaminase protein or catalytic domain thereof which is under control of said first or second regulatory element or operably linked to a third regulatory element; wherein if said nucleotide sequence encoding the nucleotide deaminase protein or catalytic domain thereof is operably linked to the third regulatory element, said nucleotide deaminase protein or catalytic domain thereof is adapted to link to said guide molecule or said Cas13 protein after expression; and wherein components (i), (ii) and (iii) are located on the same or different vectors of the system, optionally wherein said first, second, and/or third regulatory element is an inducible promoter.

[0010] In some embodiments, the nucleotide deaminase is an adenosine deaminase or a cytidine deaminase. In some embodiments, the nucleotide deaminase is an adenosine deaminase. In some embodiments, the adenosine deaminase protein or catalytic domain thereof is an RNA-specific adenosine deaminase and/or is a human, cephalopod, or Drosophila adenosine deaminase protein or catalytic domain thereof, preferably ADAR, optionally huADAR, optionally (hu)ADAR1 or (hu)ADAR2, preferably huADAR2 or catalytic domain thereof. In some embodiments, the adenosine deaminase protein or catalytic domain thereof has been modified to comprise a mutation at E488, preferably E488Q, of the hADAR2-D amino acid sequence, or a corresponding position in a homologous ADAR protein and/or wherein said adenosine deaminase protein or catalytic domain thereof has been modified to comprise a mutation at T375, preferably T375G of the hADAR2-D amino acid sequence, or a corresponding position in a homologous ADAR protein; or wherein said adenosine deaminase protein or catalytic domain thereof has been modified to comprise a mutation at E1008, preferably E1008Q, of the hADAR1d amino acid sequence, or a corresponding position in a homologous ADAR protein; or wherein said adenosine deaminase protein or catalytic domain thereof has been modified to comprise one or more mutation as provided in any of FIGS. 43A-43D, 44, 45, 46A-46B, 47A-47B, or a corresponding mutation in an ADAR homologue or orthologue.

[0011] In some embodiments, the nucleotide deaminase is a cytidine deaminase. In some embodiments, the cytidine deaminase protein or catalytic domain thereof is a human, rat or lamprey cytidine deaminase protein or catalytic domain thereof. In some embodiments, the cytidine deaminase protein or catalytic domain thereof is an apolipoprotein B mRNA-editing complex (APOBEC) family deaminase, an activation-induced deaminase (AID), or a cytidine deaminase 1 (CDA1). In some embodiments, the cytidine deaminase protein or catalytic domain thereof is an APOBEC1 deaminase comprising one or more mutations corresponding to W90A, W90Y, R118A, H121R, H122R, R126A, R126E, or R132E in rat APOBEC1, or an APOBEC3G deaminase comprising one or more mutations corresponding to W285A, W285Y, R313A, D316R, D317R, R320A, R320E, or R326E in human APOBEC3G. In some embodiments, the cytidine deaminase protein or catalytic domain thereof is delivered together with a uracil glycosylase inhibitor (UGI), where said UGI is covalently linked to said cytidine deaminase protein or catalytic domain thereof and/or said catalytically inactive Cas13 protein.

[0012] In some embodiments, the Cas13 protein is Cas13a, Cas13b, or Cas13c, preferably wherein said Cas13 a Cas13 listed in any of Tables 1, 2, 3, 4, or 6 or is from a bacterial species listed in any of Tables 1, 2, 3, 4, or 6, preferably wherein said Cas13 protein is Prevotella sp. P5-125 Cas13b, Porphyromonas gulae Cas13b, or Riemerella anatipestifer Cas13b; preferably Prevotella sp. P5-125 Cas13b. In some embodiments, the nucleotide deaminase protein or catalytic domain thereof is fused to N- or C-terminus of said dead Cas13 protein, optionally by a linker, preferably where said linker is (GGGGS)3-11, GSG5 or LEPGEKPYKCPECGKSFSQSGALTRHQRTHTR, or wherein said linker is an XTEN linker. In some embodiments, the nucleotide deaminase protein or catalytic domain thereof is linked to an adaptor protein and said guide molecule or said dead Cas13 protein comprises an aptamer sequence capable of binding to said adaptor protein, preferably wherein said adaptor protein is selected from MS2, PP7, Qβ, F2, GA, fr, JP501, M12, R17, BZ13, JP34, JP500, KU1, M11, MX1, TW18, VK, SP, FI, ID2, NL95, TW19, AP205, Cb5, ϕCb8r, ϕCb12r, ϕCb23r, 7s, and PRR1.

[0013] In some embodiments, the adenosine deaminase protein or catalytic domain thereof is inserted into an internal loop of said dead Cas13 protein. In some embodiments, the Cas13 protein is a Cas13a protein and said Cas13a comprises one or more mutations the two HEPN domains, particularly at position R474 and R1046 of Cas13a protein originating from Leptotrichia wadei or amino acid positions corresponding thereto of a Cas13a ortholog, or wherein said Cas13 protein is a Cas13b protein and said Cas13b comprises a mutation in one or more of positions R116, H121, R1177, H1182, preferably R116A, H121A, R1177A, H1182A of Cas13b protein originating from Bergeyella zoohelcum ATCC 43767 or amino acid positions corresponding thereto of a Cas13b ortholog, or wherein said Cas13 protein is a Cas13b protein and said Cas13b comprises a mutation in one or more of positions R128, H133, R1053, H1058, preferably H133 and H1058, preferably H133A and H1058A, of a Cas13b protein originating from Prevotella sp. P5-125 or amino acid positions corresponding thereto of a Cas13b ortholog. In some embodiments, the guide sequence comprises a non-pairing Cytosine at a position corresponding to said Adenine resulting in an A-C mismatch in the RNA duplex formed wherein said guide sequence has a length of from about 20 to about 53 nucleotides (nt), preferably from about 25 to about 53 nt, more preferably from about 29 to about 53 nt or from about 40 to about 50 nt capable of forming said RNA duplex with said target sequence.

[0014] In some embodiments, the distance between said non-pairing C and the 5′ end of said guide sequence is 20-30 nucleotides. In some embodiments, the Cas13, preferably Cas13b, is truncated, preferably C-terminally truncated, preferably wherein said Cas13 is a truncated functional variant of the corresponding wild type Cas13, optionally wherein said truncated Cas13b is encoded by nt 1-984 of Prevotella sp. P5-125 Cas13b or the corresponding nt of a Cas13b orthologue or homologue. In some embodiments, the guide sequence comprises more than one mismatches corresponding to different adenosine sites in the target RNA or wherein two guide molecules are used, each comprising a mismatch corresponding to a different adenosine site in the target RNA. In some embodiments, the Cas13 protein and optionally said adenosine deaminase protein or catalytic domain thereof comprise one or more heterologous nuclear export signal(s) (NES(s)) or nuclear localization signal(s) (NLS(s)), preferably an HIV Rev NES or MAPK NES, preferably C-terminal. In some embodiments, the target RNA is within a cell, preferably a eukaryotic cell, most preferably a human or non-human animal cell, or a plant cell.

[0015] In another aspect, the present disclosure includes a method of modifying post-translational modification sites on a protein encoded by a target RNA comprising: contacting the target RNA with the system disclosed herein. In some embodiments, the (a), (b), and (c) in the system of any one of claims 1 to 25 are delivered or are to be delivered as one or more polynucleotide molecules, as a ribonucleoprotein complex, optionally via particles, vesicles, or one or more viral vectors.

[0016] In another aspect, the present disclosure includes systems and methods for use in prophylactic or therapeutic treatment, preferably wherein said target RNA is within a human or animal.

[0017] In another aspect, the present disclosure includes systems and methods for use in the treatment or prevention of a disease by inhibiting activation of pathological activation of cell signaling mediated by post-translational modification, preferably phosphorylation. In some embodiments, the disease is selected from cancer, immunodeficiency diseases or disorders, infectious disease, inflammatory disorders, and neurodegenerative diseases and disorders. In some embodiments, the modification changes the encoded amino acid from a serine, threonine, or tyrosine to an amino acid that cannot be phosphorylated. In some embodiments, the modification inactivates a phosphorylation site of a protein involved in MDM2-p53 signaling pathway, PI3K-Akt signaling pathways, Ras signaling pathways, GPCR signaling pathway, Wnt signaling pathway, Hippo signaling pathway, TGF signaling pathway, NF-κB signaling pathway, Notch signaling pathway, Hedgehog signaling pathway, and/or cell-cycle signaling pathway. In some embodiments, the modification inactivates a phosphorylation site of a protein involved in MDM2-p53 signaling pathway and PI3K-Akt signaling pathway, preferably the phosphorylation site is on MDM2 at S166, S190, S240, S242, S246, S260, S386, S395, S407, T419, S425, and/or S439, Akt at S473 and/or T308, or MDM4 at S96, Y99, S296, S342, S367, and/or S403. In some embodiments, the modification inactivates a phosphorylation site of: IκBα at S32 and/or S36, NIK at T599, p100 at S866, S870, S872, Notch1 at S2152, Raf-1 at S43, S259, S338, and/or Y341, β-catenin at S33, S37, S45, and/or T41, BAD at S122 and/or S136, GSK-3β at S9, RelA(p65) at S910, YAP at S61, S109, S127, S164, S381, and/or S384, or TAZ at S66, S89, S117, and/or S311, YAP at S127, Caspase-9 at S196, MLK3 at S647, and ASK1 at S83, CREB at S133, FOXO1 at S256, S319, and T24, FOXO2 at S32, S253, and S315, and FOXO4 at S193, S258, and T28, and IKKa at T23. In some embodiments, the disease is a p53 WT lymphoma.

[0018] In some embodiments, the modification inactivates at least two or at least three phosphorylation sites of the same protein. In some embodiments, at least two or at least three different guide molecules are used to target the at least two or at least three phosphorylation sites of the same protein. In some embodiments, a single guide molecule is used to target the at least two or at least three phosphorylation sites of the same protein. In some embodiments, the modification inactivates a phosphorylation site of at least two or at least three proteins involved in the same signaling pathway. In some embodiments, the modification modulates at least two or at least three different signaling pathways selected from Akt-MDM2 signaling pathway, Ras signaling pathways, GPCR signaling pathway, Wnt signaling pathway, Hippo signaling pathway, TGFβ signaling pathway, NF-κB signaling pathway, Notch signaling pathway, Hedgehog signaling pathway, and/or cell-cycle signaling pathway. In some embodiments, the modification modulates at least one p53-dependent signaling pathway and at least one p53-independent signaling pathway.

[0019] In another aspect, the present disclosure includes a cell obtained from the method herein and/or comprising the system herein, or progeny of said modified cell. In some embodiments, the cell is a eukaryotic cell, preferably a human or non-human animal cell, optionally a therapeutic T cell or an antibody-producing B-cell, or wherein said cell is a plant cell.

[0020] In another aspect, the present disclosure includes a non-human animal comprising said modified cell herein or a progeny thereof. In another aspect, the present disclosure includes a plant comprising said cell herein or a progeny thereof. In another aspect, the present disclosure includes a modified cell herein for use in therapy, preferably cell therapy.

[0021] In another aspect, the present disclosure includes a composition comprising a library of at least 100, at least 1000, or at least 10,000 different guide molecules, wherein each guide molecule is capable of forming a complex with a Cas13 protein and directs said complex to bind a target RNA sequence encoding a phosphorylation site of a protein involved in a cell signaling pathway.

[0022] In another aspect, the present disclosure includes a composition comprising a population of cells obtainable or obtained by: (a) introducing the library of guide molecules of claim 46 into at least 100, at least 1,000 or at least 10,000 cells, preferably at an average ratio of no more than one guide molecule per cell, the cells each expressing a catalytically inactive (dead) Cas13 protein and an adenosine deaminase protein or catalytic domain thereof, wherein the adenosine deaminase protein or catalytic domain thereof is covalently or non-covalently linked to the dead Cas13 protein or is adapted to bind the guide molecule after introduction thereof; or (b) introducing the library of guide molecules of claim 46 into at least 100, at least 1,000 or at least 10,000 cells, preferably at an average ratio of no more than one guide molecule per cell, and simultaneously or sequentially introducing to the cells one or more nucleic acid sequences encoding the catalytically inactive (dead) Cas13 protein and the adenosine deaminase protein or catalytic domain thereof.

[0023] In another aspect, the present disclosure includes a method for identifying a phosphorylation site associated with a target phenotype, comprising: selecting cells from the population of cells herein based on a target phenotype, wherein optionally the population of cells are cancer cells and the target phenotype is apoptosis, preferably in response to a cancer drug; and determining relative representation of the guide molecules present in the selected cells and identifying a phosphorylation site associated with the target phenotype.

[0024] In another aspect, the present disclosure includes a method for detecting hepatitis B (HBV) associated diffuse large B-cell lymphoma (DLBCL) comprising detecting one or more of TMSB4X, FAS, BCL6, KLF2, UBE2A, SGK1, CD70, BIG2, PIM1, CXCR4, DTX1, EBF1, TNFRSF14, TP53, ZFP36L1, CDK14, IKZF3, and TP73.

[0025] In another aspect, the present disclosure includes a method for treating HBV-associated DLBCL comprising targeting: TP65, TP73, TP53, or a combination thereof, CDKN1B, BCL6, KLF2; CBP/p300; and/or CD27-CD70 pathway or TNFRSF14-TNFSF14 pathway.

[0026] In certain aspect, a method for modifying post-translational modification sites on proteins encoded by target RNAs comprises delivery the above system to said target RNAs.

[0027] In certain example embodiments, the system may be a particle delivery system comprising a ribonucleoprotein complex comprising the guide sequence, catalytically inactive Cas13 protein, and adenosine deaminase protein or catalytically domain encapsulated within or otherwise attached to a delivery particle. The delivery particle may further comprise one or more tissue-specific, cell-specific, or cell compartment-specific targeting molecules.

[0028] In certain other example embodiments, the system may be a vector system comprising one or more vectors. The Cas13 protein, guide molecule, and adenosine deaminase (or catalytic domain thereof) may be on the same or different vectors. If on the same vectors, the three component may be operably linked to the same or individually different regulatory elements. In embodiments, where the adenosine deaminase or catalytic domain thereof is operably linked to a separate regulatory element, the adenosine deaminase or catalytic domain thereof is adapted to link to the guide molecule or Cas13 protein after expression. The regulatory element may be an inducible promoter.

[0029] The Cas13 protein Cas13a, Cas13b or Cas13c, preferably wherein said Cas13 a Cas13 listed in any of Tables 1, 2, 3, 4, or 6 or is from a bacterial species listed in any of Tables 1, 2, 3, 4, or 6, preferably wherein said Cas13 protein is Prevotella sp. P5-125 Cas13b, Porphyromas gulae Cas13b, or Riemerella anatipestifer Cas13b; preferably Prevotella sp. P5-125 Cas13b.

[0030] In certain example embodiments, the adenosine deaminase protein or catalytic domain thereof is fused to N- or C-terminus of said dead Cas13 protein, optionally by a linker, preferably where said linker is (GGGGS)₃₁₁ (SEQ ID NO:1-9), GSG₅ (SEQ ID NO:10) or LEPGEKPYKCPECGKSFSQSGALTRHQRTHTR (SEQ ID NO:11), or wherein said linker is an XTEN linker.

[0031] In certain example embodiments, the adenosine deaminase protein or catalytic domain thereof is linked to an adaptor protein and said guide molecule or said dead Cas13 protein comprises an aptamer sequence capable of binding to said adaptor protein, preferably wherein said adaptor sequence is selected from MS2, PP7, Qβ, F2, GA, fr, JP501, M12, R17, BZ13, JP34, JP500, KU1, M11, MX1, TW18, VK, SP, FI, ID2, NL95, TW19, AP205, ϕCb5, ϕCb8r, ϕCb12r, ϕCb23r, 7s and PRR1.

[0032] In certain example embodiments, the adenosine deaminase protein or catalytic domain thereof may be inserted into an internal loop of said dead Cas13 protein. The Cas13 protein may be a Cas13a comprising one or more mutations the two HEPN domains, particularly at position R474 and R1046 of Cas13a protein originating from Leptotrichia wadei or amino acid positions corresponding thereto of a Cas13a ortholog, or wherein said Cas13 protein is a Cas13b protein and said Cas13b comprises a mutation in one or more of positions R116, H121, R1177, H1182, preferably R116A, H121A, R1177A, H1182A of Cas13b protein originating from Bergeyella zoohelcum ATCC 43767 or amino acid positions corresponding thereto of a Cas13b ortholog, or wherein said Cas13 protein is a Cas13b protein and said Cas13b comprises a mutation in one or more of positions R128, H133, R1053, H1058, preferably H133 and H1058, preferably H133A and H1058A, of a Cas13b protein originating from Prevotella sp. P5-125 or amino acid positions corresponding thereto of a Cas13b ortholog.

[0033] In certain example embodiments, the guide sequence comprises a non-pairing Cytosine at a position corresponding to said Adenine resulting in an A-C mismatch in the RNA duplex formed wherein said guide sequence has a length of about 20-53 nt, preferably 25-53 nt, more preferably 29-53 nt or 40-50 nt capable of forming said RNA duplex with said target sequence. The distance between said non-pairing C and the 5′ end of said guide sequence may be 20-30 nucleotides.

[0034] The said adenosine deaminase protein or catalytic domain thereof may be an RNA specific adenosine deaminase and/or is a human, cephalopod, or Drosophila adenosine deaminase protein or catalytic domain thereof, preferably ADAR, optionally huADAR, optionally (hu)ADAR1 or (hu)ADAR2, preferably huADAR2 or catalytic domain thereof. In certain embodiments, the adenosine deaminase protein or catalytic domain thereof may be modified to comprise a mutation at E488, preferably E488Q, of the hADAR2-D amino acid sequence, or a corresponding position in a homologous ADAR protein and/or wherein said adenosine deaminase protein or catalytic domain thereof has been modified to comprise a mutation at T375, preferably T375G of the hADAR2-D amino acid sequence, or a corresponding position in a homologous ADAR protein; or wherein said adenosine deaminase protein or catalytic domain thereof has been modified to comprise a mutation at E1008, preferably E1008Q, of the hADAR1d amino acid sequence, or a corresponding position in a homologous ADAR protein; or wherein said adenosine deaminase protein or catalytic domain thereof has been modified to comprise one or more mutation as provided in any of FIGS. 43A-43D, 44, 45, 46A-46B, and 47A-47B, or a corresponding mutation in an ADAR homologue or orthologue.

[0035] In certain example embodiments, Cas13, preferably Cas13b, is truncated, preferably C-terminally truncated, preferably wherein said Cas13 is a truncated functional variant of the corresponding wild type Cas13, optionally wherein said truncated Cas13b is encoded by nt 1-984 of Prevotella sp. P5-125 Cas13b or the corresponding nt of a Cas13b orthologue or homologue.

[0036] In certain embodiments, the guide sequence may comprise more than one mismatch corresponding to different adenosine sites in the target RNA sequence or wherein two guide molecules are used, each comprising a mismatch corresponding to a different adenosine sites in the target RNA sequence.

[0037] In certain embodiments, the Cas13 protein and optionally the adenosine deaminase protein or catalytic domain thereof may comprise one or more heterologous nuclear export signal(s) (NES(s)) or nuclear localization signal(s) (NLS(s)), preferably an HIV Rev NES or MAPK NES, preferably C-terminal.

[0038] The target RNA sequence of interest may be within a cell, preferably a eukaryotic cell, most preferably a human or non-human animal cell, or a plant cell.

[0039] The systems disclosed herein may be use in prophylactic or therapeutic treatment, preferably wherein said target locus of interest is within a human or animal.

[0040] In certain embodiments, the systems may be used in the treatment or prevention of a disease by inhibiting activation of pathological activation of cell signaling mediated by post-translational modification, preferably phosphorylation.

[0041] The disease may include cancer, immunodeficiency diseases or disorders, infectious diseases, inflammatory disorders, and neurodegenerative diseases and disorders.

[0042] In certain embodiments, the modification may change the encoded amino acid from a serine, threonine, or tyrosine to an amino acid that cannot be phosphorylated.

[0043] In other embodiments, the modification may inactivate a phosphorylation site of a protein involved in the MDM2-p53 signaling pathway, the PI3K-Akt signaling pathways, the Ras signaling pathways, the GPCR signaling pathway, the Wnt signaling pathway, the Hippo signaling pathway, the TGFβ signaling pathway, the NF-κB signaling pathway, the Notch signaling pathway, the Hedgehog signaling pathway, the cell-cycle signaling pathway.

[0044] In certain embodiments, the modification may inactivate a phosphorylation site of a protein involved in the MDM2-p53 signaling pathway and the PI3K-Akt signaling pathway, preferably MDM2 at S166, S190, S240, S242, S246, S260, S386, S395, S407, T419, S425, and/or S439, Akt at S473 and/or T308, or MDM4 at S96, Y99, S296, S342, S367, and/or S403

[0045] In other embodiments, the modification may inactivate a phosphorylation site of IκBα at S32 and/or S36, NIK at T599, p100 at S866, S870, S872, Notch1 at S2152, Raf-1 at S43, S259, S338, and/or Y341, β-catenin at S33, S37, S45, and/or T41, BAD at S122 and/or S136, GSK-3β at S9, RelA(p65) at S910, YAP at S61, S109, S127, S164, S381, and/or S384, or TAZ at S66, S89, S117, and/or S311, YAP at S127, Caspase-9 at S196, MLK3 at S647, and ASK1 at S83, CREB at S133, FOXO1 at S256, S319, and T24, FOXO2 at S32, S253, and S315, and FOXO4 at S193, S258, and T28, and IKKa T23.

[0046] In one example embodiment, the disease is a p53 WT lymphoma.

[0047] In certain embodiments, the modification may inactivate at least two or at least three phosphorylation sites of the same protein.

[0048] In certain embodiments, at least two or at least three different guide molecules may be used to target at least two or at least three phosphorylation sites of the same protein. In other embodiments, a single guide molecule may be used to target at least two or at least three phosphorylation sites of the same protein that are close to each other.

[0049] In certain example embodiments, the modification inactivates a phosphorylation site of at least two or at least three proteins involved in the same signaling pathway.

[0050] In certain example embodiments, the modification may modulate at least two or at least three different signaling pathways selected from the Akt-MDM2 signaling pathway, the Ras signaling pathways, the GPCR signaling pathway, the Wnt signaling pathway, the Hippo signaling pathway, the TGFβ signaling pathway, the NF-κB signaling pathway, the Notch signaling pathway, the Hedgehog signaling pathway, the cell-cycle signaling pathway.

[0051] In certain other example embodiments, the modification may modulate at least one p53-dependent signaling pathway and at least one p53-independent signaling pathway.

[0052] In another aspects, the invention comprises a cell obtained from the method of any of embodiments disclosed herein and/or comprising the system of any of the embodiments disclosed herein, or progeny of said modified cell. The cell may be a eukaryotic cell, preferably a human or non-human animal cell, optionally a therapeutic T cell or an antibody-producing B-cell or wherein said cell is a plant cell.

[0053] In other aspects, the invention comprises non-human animal comprising said modified cell or progeny thereof.

[0054] In another aspect, the invention comprises a plant comprising said modified cell or progeny thereof.

[0055] In certain embodiments, the modified cell may use in therapy, preferably cell therapy.

[0056] In another aspect, the invention comprises a composition comprising a library of at least 100, at least 1000, or at least 10,000 different guide molecules, wherein each wherein each guide molecule is capable of forming a complex with a Cas13 protein and directs said complex to bind a target RNA sequence encoding a phosphorylation site of a protein involved in a cell signaling pathway.

[0057] In another aspect, the invention comprises as composition comprising a population of cells obtainable or obtained by: (a) introducing the library of guide molecules of claim 36 into at least 100, at least 1,000 or at least 10,000 cells, preferably at an average ratio of no more than one guide RNA per cell, the cells each expressing a catalytically inactive Cas13 protein and an adenosine deaminase protein or catalytic domain thereof, wherein the adenosine deaminase protein or catalytic domain thereof is covalently or non-covalently linked to the Cas13 protein or is adapted to bind the guide molecule after introduction thereof, or (b) introducing the library of guide molecules of claim 36 into at least 100, at least 1,000 or at least 10,000 cells, preferably at an average ratio of no more than one guide RNA per cell, and simultaneously or sequentially introducing to the cells one or more nucleic acid sequences encoding the catalytically inactive Cas13 protein and the adenosine deaminase protein or catalytic domain thereof.

[0058] In yet another aspect, the invention may comprise a method for identifying a phosphorylation site associated with a target phenotype, comprising: selecting the population of cells of claim 37 based on a target phenotype, wherein optionally the cells are cancer cells and the target phenotype is apoptosis, preferably in response to a cancer drug; and determining relative representation of the guide molecules present in the selected cells, and identifying a phosphorylation site associated with the target phenotype.

[0059] These and other aspects, objects, features, and advantages of the example embodiments will become apparent to those having ordinary skill in the art upon consideration of the following detailed description of illustrated example embodiments.

### BRIEF DESCRIPTION OF THE DRAWINGS

[0060] The novel features of the invention are set forth with particularity in the appended claims. A better understanding of the features and advantages of the present invention will be obtained by reference to the following detailed description that sets forth illustrative embodiments, in which the principles of the invention are utilized, and the accompanying drawings of which:

[0061] FIG. 1 illustrates an example embodiment of the invention for targeted deamination of adenine at a target RNA sequence of interest, exemplified herein with a Cas13b protein.

[0062] FIG. 2 illustrates the Development of RNA editing as a therapeutic strategy to treat human disease at the transcript level such as when using Cas13b. Schematic of RNA base editing by Cas13-ADAR2 fusion targeting an engineered pre-termination stop codon in the luciferase transcript.

[0063] FIG. 3 Guide position and length optimization to restore luciferase expression.

[0064] FIG. 4 Exemplary sequences of adenine deaminase proteins. (SEQ ID Nos. 650-656)

[0065] FIG. 5 Guides used in an exemplary embodiment (SEQ ID Nos. 657-660)

[0066] FIG. 6: Editing efficiency correlates to edited base being further away from the DR and having a long RNA duplex, which is accomplished by extending the guide length

[0067] FIG. 7 Greater editing efficiency the further the editing site is away from the DR/protein binding area.

[0068] FIG. 8 Distance of edited site from DR

[0069] FIGS. 9A and 9B: Fused ADAR1 or ADAR2 to Cas13b12 (double R HEPN mutant) on the N or C-terminus. Guides are perfect matches to the stop codon in luciferase. Signal appears correlated with distance between edited base and 5′ end of the guide, with shorter distances providing better editing.

[0070] FIG. 10: Cluc/Gluc tiling for Cas13a/Cas13b interference

[0071] FIGS. 11A-11C: ADAR editing quantification by NGS (luciferase reporter).

[0072] FIG. 12: ADAR editing quantification by NGS (KRAS and PPIB).

[0073] FIGS. 13A-13C: Cas13a/b+shRNA specificity from RNA Seq

[0074] FIG. 14: Mismatch specificity to reduce off targets (A:A or A:G) (SEQ ID Nos. 661-668)

[0075] FIG. 15: Mismatch for on-target activity

[0076] FIG. 16: ADAR Motif preference

[0077] FIG. 17: Larger bubbles to enhance RNA editing efficiency

[0078] FIG. 18: Editing of multiple A's in a transcript (SEQ ID Nos. 669-672)

[0079] FIG. 19: Guide length titration for RNA editing

[0080] FIGS. 20A-20F: Mammalian codon-optimized Cas13b orthologs mediate highly efficient RNA knockdown. (FIG. 20A) Schematic of representative Cas13a, Cas13b, and Cas13c loci and associated crRNAs. (FIG. 20B) Schematic of luciferase assay to measure Cas13a cleavage activity in HEK293FT cells. (FIG. 20C) RNA knockdown efficiency using two different guides targeting Cluc with 19 Cas13a, 15 Cas13b, and 5 Cas13c orthologs. Luciferase expression is normalized to the expression in non-targeting guide control conditions. (FIG. 20D) The top 7 orthologs performing in part C are assayed for activity with three different NLS and NES tags with two different guide RNAs targeting Cluc. (FIG. 20E) Cas13b12 and Cas13a2 (LwCas13a) are compared for knockdown activity against Gluc and Cluc. Guides are tiled along the transcripts and guides between Cas13b12 and Cas13a2 are position matched. (FIG. 20F) Guide knockdown for Cas13a2, Cas13b6, Cas13b11, and Cas13b12 against the endogenous KRAS transcript and are compared against corresponding shRNAs.

[0081] FIGS. 21A-21G: Cas13 enzymes mediate specific RNA knockdown in mammalian cells. (FIG. 21A) Schematic of semi-degenerate target sequences for Cas13a/b mismatch specificity testing. (SEQ ID Nos. 673-694) (FIG. 21B) Heatmap of single mismatch knockdown data for Cas13 a/b. Knockdown is normalized to non-targeting (NT) guides for each enzyme. (FIG. 21C) Double mismatch knockdown data for Cas13a. The position of each mismatch is indicated on the X and Y axes. Knockdown data is the sum of all double mismatches for a given set of positions. Data is normalized to NT guides for each enzyme. (FIG. 21D) Double mismatch knockdown data for Cas13b. See C for description. (FIG. 21E) RNA-seq data comparing transcriptome-wide specificity for Cas13 a/b and shRNA for position-matched guides. The Y axis represents read counts for the targeting condition and the X axis represents counts for the non-targeting condition. (FIG. 21F) RNA expression as calculated from RNA-seq data for Cas13 a/b and shRNA. (FIG. 21G) Significant off-targets for Cas13 a/b and shRNA from RNA-seq data. Significant off-targets were calculated using FDR<0.05.

[0082] FIGS. 22A-22F: Catalytically inactive Cas13b-ADAR fusions enable targeted RNA editing in mammalian cells. (FIG. 22A) Schematic of RNA editing with Cas13b-ADAR fusion proteins to remove stop codons on the Cypridina luciferase transcript. (FIG. 22B) RNA editing comparison between Cas13b fused with wild-type ADAR2 and Cas13b fused with the hyperactive ADAR2 E488Q mutant for multiple guide positions. Luciferase expression is normalized to Gaussia luciferase control values. (FIG. 22C) RNA editing comparisons between 30, 50, 70, and 84 nt guides designed to target various positions surrounding the editing site. (FIG. 22D) Schematic showing the position and length of guides used for sequencing quantification relative to the stop codon on the Cypridina luciferase transcript. (SEQ ID No. 695) (FIG. 22E) On- and off-target editing efficiencies for each guide design at the corresponding adenine bases on the Cypridina luciferase transcript as quantified by sequencing. (FIG. 22F) Luciferase readout of guides with varied bases opposite to the targeted adenine.

[0083] FIG. 23: Endogenous RNA editing with Cas13b-ADAR fusions. (Next generation sequencing of endogenous Cas13b12-ADAR editing of endogenous KRAS and PPIB loci. Two different regions per transcript were targeted and A->G editing was quantified at all adenines in the vicinity of the targeted adenine.

[0084] FIG. 24: Strategy for determining optimal guide position.

[0085] FIGS. 25A-25C: (FIG. 25A) Cas13b-huADAR2 promotes repair of mutated luciferase transcripts. (FIG. 25B) Cas13b-huADAR1 promotes repair of mutated luciferase transcripts. (FIG. 25C) Comparison of human ADAR1 and human ADAR2.

[0086] FIG. 26: Comparison of E488Q vs. wt dADAR2 editing. E488Q is a hyperactive mutant of dADAR2.

[0087] FIGS. 27A-27B: Transcripts targeted by Cas13b-huADAR2-E488Q contain the expected A-G edit. (FIG. 27A) heatmap. (FIG. 27B) Positions in template. Only A sites are shown with the editing rate to G as in heatmap.

[0088] FIGS. 28A-28B: Endogenous tiling of guides. (FIG. 28A) KRAS: heatmap. (top) Positions in template (bottom). Only A sites are shown with the editing rate to G as in heatmap. (FIG. 28B) PPIB: heatmap. (top) Positions in template (bottom). Only A sites are shown with the editing rate to G as in heatmap.

[0089] FIG. 29: Non-targeting editing.

[0090] FIG. 30: Linker optimization.

[0091] FIG. 31: Cas13b ADAR can be used to correct pathogenic A>G mutations from patients in expressed cDNAs.

[0092] FIG. 32: Cas13b-ADAR has a slight restriction on 5′ G motifs.

[0093] FIG. 33: Screening degenerate PFS locations for effect on editing efficiency. All PFS (4-N) identities have higher editing than non-targeting (SEQ ID NO:696-699).

[0094] FIG. 34: Reducing off-target editing in the target transcript.

[0095] FIG. 35: Reducing off-target editing in the target transcript.

[0096] FIGS. 36A-36B: Cas13b-ADAR transcriptome specificity. On-target editing is 71%. (FIG. 36A) targeting guide; 482 significant sites. (FIG. 36B) non-targeting guide; 949 significant sites. Note that chromosome 0 is Gluc and chromosome 1 is Cluc; human chromosomes are then in order after that.

[0097] FIGS. 37A-37B: Cas13b-ADAR transcriptome specificity. (FIG. 37A) targeting guide. (FIG. 37B) non-targeting guide.

[0098] FIG. 38: Cas13b has the highest efficiency compared to competing ADAR editing strategies.

[0099] FIGS. 39A-39D: Competing RNA editing systems. (FIG. 39A and FIG. 39B) BoxB; on-target editing is 63%; (FIG. 39A) targeting guide—2020 significant sites; (FIG. 39B) non-targeting guide—1805 significant sites. (FIG. 39C-FIG. 39D) Stafforst; on-target editing is 36%; (FIG. 39C) targeting guide—176 significant sites; (FIG. 39D) non-targeting guide—186 significant sites.

[0100] FIG. 40: Dose titration of ADAR. crRNA amount is constant.

[0101] FIGS. 41A-41D: Dose response effect on specificity. (FIGS. 40A-40B) 150 ng Cas13-ADAR; on-target editing is 83%; (FIG. 40A) targeting guide—1231 significant sites; (FIG. 40B) non-targeting guide—520 significant sites. (FIGS. 40C-40D) 10 ng Cas13-ADAR; on-target editing is 80%; (FIG. 40C) targeting guide—347 significant sites; (FIG. 40D) non-targeting guide—223 significant sites.

[0102] FIGS. 42A-42B: ADAR1 seems more specific than ADAR2. On-target editing is 29%. (FIG. 42A) targeting guide; 11 significant sites. (FIG. 42B) non-targeting guide; 6 significant sites. Note that chromosome 0 is Glue and chromosome 1 is Clue; human chromosomes are then in order after that.

[0103] FIGS. 43A-43D: ADAR specificity mutants have enhanced specificity. (FIG. 43A) Targeting guide. (FIG. 43B) Non-targeting guide. (FIG. 43C) Targeting to non-targeting ratio. (FIG. 43D) Targeting and non-targeting guide.

[0104] FIG. 44: ADAR mutant luciferase results plotted along the contact points of each residue with the RNA target (SEQ ID NO:777 and 778).

[0105] FIG. 45: ADAR specificity mutants have enhanced specificity. Purple points are mutants selected for whole transcriptome off-target NGS analysis. Red point is the starting point (i.e. E488Q mutant). Note that all additional mutants also have the E488Q mutation.

[0106] FIGS. 46A-46B: ADAR mutants are more specific according to NGS. (FIG. 46A) on target. (FIG. 46B) Off-target.

[0107] FIGS. 47A-47B: Luciferase data on ADAR specificity mutants matches the NGS. (FIG. 47A) Targeting guide selected for NGS. (FIG. 47B) Non-targeting guide selected for NGS. Luciferase data matches the NGS data in FIGS. 46A-46B. The orthologs that have fewer activity with non-targeting guide have fewer off-targets across the transcriptome and their on-target editing efficiency can be predicted by the targeting guide luciferase condition.

[0108] FIGS. 48A-48C: C-terminal truncations of Cas13b 12 are still highly active in ADAR editing.

[0109] FIGS. 49A-49G: Characterization of a highly active Cas13b ortholog for RNA knockdown FIG. 49A) Schematic of stereotypical Cas13 loci and corresponding crRNA structure. FIG. 49B) Evaluation of 19 Cas13a, 15 Cas13b, and 7 Cas13c orthologs for luciferase knockdown using two different guides. Orthologs with efficient knockdown using both guides are labeled with their host organism name. Values are normalized to a non-targeting guide with designed against the E. coli LacZ transcript, with no homology to the human transcriptome. FIG. 49C) PspCas13b and LwaCas13a knockdown activity are compared by tiling guides against Glue and measuring luciferase expression. Values represent mean+/−S.E.M. Non-targeting guide is the same as in FIG. 49B. FIG. 49D) PspCas13b and LwaCas13a knockdown activity are compared by tiling guides against Cluc and measuring luciferase expression. Values represent mean+/−S.E.M. Non-targeting guide is the same as in FIG. 49B. FIG. 49E) Expression levels in log 2(transcripts per million (TPM)) values of all genes detected in RNA-seq libraries of non-targeting control (x-axis) compared to Gluc-targeting condition (y-axis) for LwaCas13a (red) and shRNA (black). Shown is the mean of three biological replicates. The Gluc transcript data point is labeled. Non-targeting guide is the same as in FIG. 49B. FIG. 49F) Expression levels in log 2(transcripts per million (TPM)) values of all genes detected in RNA-seq libraries of non-targeting control (x-axis) compared to Gluc-targeting condition (y-axis) for PspCas13b (blue) and shRNA (black). Shown is the mean of three biological replicates. The Gluc transcript data point is labeled. Non-targeting guide is the same as in FIG. 49B. FIG. 49G) Number of significant off-targets from Gluc knockdown for LwaCas13a, PspCas13b, and shRNA from the transcriptome wide analysis in FIGS. 49E and 49F.

[0110] FIG. 50A-50E: Engineering dCas13b-ADAR fusions for RNA editing FIG. 50A) Schematic of RNA editing by dCas13b-ADAR fusion proteins. Catalytically dead Cas13b (dCas13b) is fused to the deaminase domain of human ADAR (ADAR_{DD}), which naturally deaminates adenosines to insosines in dsRNA. The crRNA specifies the target site by hybridizing to the bases surrounding the target adenosine, creating a dsRNA structure for editing, and recruiting the dCas13b-ADAR_{DD} fusion. A mismatched cytidine in the crRNA opposite the target adenosine enhances the editing reaction, promoting target adenosine deamination to inosine, a base that functionally mimics guanosine in many cellular reactions.

[0111] FIG. 50B) Schematic of Cypridina luciferase W85X target and targeting guide design. (SEQ ID Nos. 700 and 701) Deamination of the target adenosine restores the stop codon to the wildtype tryptophan. Spacer length is the region of the guide that contains homology to the target sequence. Mismatch distance is the number of bases between the 3′ end of the spacer and the mismatched cytidine. The cytidine mismatched base is included as part of the mismatch distance calculation. FIG. 50C) Quantification of luciferase activity restoration for Cas13b-dADAR1 (left) and Cas13b-ADAR2-cd (right) with tiling guides of length 30, 50, 70, or 84 nt. All guides with even mismatch distances are tested for each guide length. Values are background subtracted relative to a 30nt non-targeting guide that is randomized with no sequence homology to the human transcriptome. FIG. 50D) Schematic of target site for targeting Cypridinia luciferase W85X. (SEQ ID No. 702) FIG. 50E) Sequencing quantification of A->I editing for 50 nt guides targeting Cypridinia luciferase W85X. Blue triangle indicates the targeted adenosine. For each guide, the region of duplex RNA is outlined in red. Values represent mean+/−S.E.M. Non-targeting guide is the same as in FIG. 50C.

[0112] FIGS. 51A-51D: Measuring sequence flexibility for RNA editing by REPAIRv1. FIG. 51A) Schematic of screen for determining Protospacer Flanking Site (PFS) preferences of RNA editing by REPAIRv1. A randomized PFS sequence is cloned 5′ to a target site for REPAIR editing (SEQ ID NO:779). Following exposure to REPAIR, deep sequencing of reverse transcribed RNA from the target site and PFS is used to associate edited reads with PFS sequences. FIG. 51B) Distributions of RNA editing efficiencies for all 4-N PFS combinations at two different editing sites. FIG. 51C) Quantification of the percent editing of REPAIRv1 at Cluc W85 across all possible 3 base motifs. Values represent mean+/−S.E.M. Non-targeting guide is the same as in FIG. 50C. FIG. 51D) Heatmap of 5′ and 3′ base preferences of RNA editing at Cluc W85 for all possible 3 base motifs.

[0113] FIGS. 52A-52G: Correction of disease-relevant mutations with REPAIRv1 FIG. 52A) Schematic of target and guide design for targeting AVPR2 878G>A. (SEQ ID Nos. 705-708) FIG. 52B) The 878G>A mutation in AVPR2 is corrected to varying percentages using REPAIRv1 with three different guide designs. For each guide, the region of duplex RNA is outlined in red. Values represent mean+/−S.E.M. Non-targeting guide is the same as in FIG. 50C. FIG. 52C) Schematic of target and guide design for targeting FANCC 1517G>A. (SEQ ID Nos. 709-712) FIG. 52D) The 1517G>A mutation in FANCC is corrected to varying percentages using REPAIRv1 with three different guide designs. For each guide, the region of duplex RNA is outlined in red. The heatmap scale bar is the same as in panel B. Values represent mean+/−S.E.M. Non-targeting guide is the same as in FIG. 50C. FIG. 52E) Quantification of the percent editing of 34 different disease-relevant G>A mutations using REPAIRv1. Non-targeting guide is the same as in FIG. 50C. FIG. 52F) Analysis of all the possible G>A mutations that could be corrected as annotated by the ClinVar database. The distribution of editing motifs for all G>A mutations in ClinVar is shown versus the editing efficiency by REPAIRv1 per motif as quantified on the Gluc transcript. FIG. 52G) The distribution of editing motifs for all G>A mutations in ClinVar is shown versus the editing efficiency by REPAIRv1 per motif as quantified on the Gluc transcript. Values represent mean+/−S.E.M.

[0114] FIGS. 53A-53D: Characterizing specificity of REPAIRv1 FIG. 53A) Schematic of KRAS target site and guide design. (SEQ ID Nos. 713-720) FIG. 53B) Quantification of percent editing for tiled KRAS-targeting guides. Editing percentages are shown at the on-target and neighboring adenosine sites. For each guide, the region of duplex RNA is indicated by a red rectangle. Values represent mean+/−S.E.M. FIG. 53C) Transcriptome-wide sites of significant RNA editing by REPAIRv1 with Cluc targeting guide. The on-target site Cluc site (254 A>G) is highlighted in orange. FIG. 53D) Transcriptome-wide sites of significant RNA editing by REPAIRv1 (150 ng REPAIR vector transfected) with non-targeting guide. Non-targeting guide is the same as in FIG. 50C.

[0115] FIGS. 54A-54F Rational mutagenesis of ADAR2 to improve the specificity of REPAIRv1 FIG. 54A) Quantification of luciferase signal restoration by various dCas13-ADAR2 mutants as well as their specificity score plotted along a schematic for the contacts between key ADAR2 deaminase residues and the dsRNA target. All deaminase mutations were made on the dCas13-ADAR2_{DD}(E488Q) background. The specificity score is defined as the ratio of the luciferase signal between targeting guide and non-targeting guide conditions. Schematic of ADAR2 deaminase domain contacts with dsRNA is adapted from ref (20) (SEQ ID NO:780 and 781). FIG. 54B) Quantification of luciferase signal restoration by various dCas13-ADAR2 mutants versus their specificity score. Non-targeting guide is the same as in FIG. 50C. FIG. 54C) Measurement of the on-target editing fraction as well as the number of significant off-targets for each dCas13-ADAR2 mutant by transcriptome wide sequencing of mRNAs. Values represent mean+/−S.E.M. Non-targeting guide is the same as in FIG. 50C.

[0116] FIG. 54D) Transcriptome-wide sites of significant RNA editing by REPAIRv1 and REPAIRv2 with a guide targeting a pretermination site in Cluc. The on-target Cluc site (254 A>G) is highlighted in orange. 10 ng of REPAIR vector was transfected for each condition.

[0117] FIG. 54E) RNA sequencing reads surrounding the on-target Cluc editing site (SEQ ID No. 721, 782-819) (254 A>G) highlighting the differences in off-target editing between REPAIRv1 and REPAIRv2. All A>G edits are highlighted in red while sequencing errors are highlighted in blue. Gaps reflect spaces between aligned reads. Non-targeting guide is the same as in FIG. 50C. FIG. 54F) RNA editing by REPAIRv1 and REPAIRv2 with guides targeting an out-of-frame UAG site in the endogenous KRAS and PPIB transcripts. The on-target editing fraction is shown as a sideways bar chart on the right for each condition row. The duplex region formed by the guide RNA is shown by a red outline box. Values represent mean+/−S.E.M. Non-targeting guide is the same as in FIG. 50C.

[0118] FIGS. 55A-55C: Bacterial screening of Cas13b orthologs for in vivo efficiency and PFS determination. FIG. 55A) Schematic of bacterial assay for determining the PFS of Cas13b orthologs. Cas13b orthologs with beta-lactamase targeting spacers (SEQ ID No. 722) are co-transformed with beta-lactamase expression plasmids containing randomized PFS sequences and subjected to double selection. PFS sequences that are depleted during co-transformation with Cas13b suggest targeting activity and are used to infer PFS preferences.

[0119] FIG. 55B) Quantitation of interference activity of Cas13b orthologs targeting beta-lactamase as measured by colony forming units (cfu). Values represent mean+/−S.D. FIG. 55C) PFS logos for Cas13b orthologs as determined by depleted sequences from the bacterial assay. PFS preferences are derived from sequences depleted in the Cas13b condition relative to empty vector controls. Depletion values used to calculate PFS weblogos are listed in table 7.

[0120] FIGS. 56A-56E: Optimization of Cas13b knockdown and further characterization of mismatch specificity. FIG. 56A) Gluc knockdown with two different guides is measured using the top 2 Cas13a and top 4 Cas13b orthologs fused to a variety of nuclear localization and nuclear export tags. FIG. 56B) Knockdown of KRAS is measured for LwaCas13a, RanCas13b, PguCas13b, and PspCas13b with four different guides and compared to four position-matched shRNA controls. Non-targeting guide is the same as in FIG. 49B. shRNA non-targeting guide sequence is listed in table 11. FIG. 56C) Schematic of the single and double mismatch plasmid libraries used for evaluating the specificity of LwaCas13a and PspCas13b knockdown. Every possible single and double mismatch is present in the target sequence as well as in 3 positions directly flanking the 5′ and 3′ ends of the target site. (SEQ ID Nos. 723-735) FIG. 56D) The depletion level of transcripts with the indicated single mismatches are plotted as a heatmap for both the LwaCas13a and PspCas13b conditions. (SEQ ID Nos. 723 and 736) The wildtype base is outlined by a green box. FIG. 56E) The depletion level of transcripts with the indicated double mismatches are plotted as a heatmap for both the LwaCas13a and PspCas13b conditions (SEQ ID Nos. 723 and 736). Each box represents the average of all possible double mismatches for the indicated position.

[0121] FIGS. 57A-57F: Characterization of design parameters for dCas13-ADAR2 RNA editing FIG. 57A) Knockdown efficiency of Gluc targeting for wildtype Cas13b and catalytically inactive H133A/H1058A Cas13b (dCas13b). FIG. 57B) Quantification of luciferase activity restoration by dCas13b fused to either the wildtype ADAR2 catalytic domain or the hyperactive E488Q mutant ADAR2 catalytic domain, tested with tiling Cluc targeting guides. FIG. 57C) Guide design and sequencing quantification of A->I editing for 30 nt guides targeting Cypridinia luciferase W85X (SEQ ID Nos. 737-745). FIG. 57D) Guide design and sequencing quantification of A->I editing for 50 nt guides targeting PPIB (SEQ ID Nos. 746-753). FIG. 57E) Influence of linker choice on luciferase activity restoration by REPAIRv1. FIG. 57F) Influence of base identify opposite the targeted adenosine on luciferase activity restoration by REPAIRv1 (SEQ ID Nos. 754 and 755). Values represent mean+/−S.E.M.

[0122] FIG. 58: ClinVar motif distribution for G>A mutations. The number of each possible triplet motif observed in the ClinVar database for all G>A mutations.

[0123] FIG. 59: Truncations of dCas13b still have functional RNA editing. Various N-terminal and C-terminal truncations of dCas13b allow for RNA editing as measured by restoration of luciferase signal for the Cluc W85X reporter. Values represent mean+/−S.E.M. The construct length refers to the coding sequence of the REPAIR constructs.

[0124] FIGS. 60A-60F: Comparison of other programmable ADAR systems with the dCas13-ADAR2 editor. FIG. 60A) Schematic of two programmable ADAR schemes: BoxB-based targeting and full length ADAR2 targeting. In the BoxB scheme (top), the ADAR2 deaminase domain (ADAR2_{DD}(E488Q)) is fused to a small bacterial virus protein called lambda N ( [symbol] N), which binds specifically a small RNA sequence called BoxB-k, and the fusion protein is recruited to target adenosines by a guide RNA containing homology to the target site and hairpins that BoxB-k binds to. Full length ADAR2 targeting utilizes a guide RNA with homology to the target site and a motif recognized by the double strand RNA binding domains of ADAR2. A guide RNA containing two BoxB-k hairpins can then guide the ADAR2_{DD}(E488Q), - [symbol] for site specific editing. In the full length ADAR2 scheme (bottom), the dsRNA binding domains of ADAR2 bind a hairpin in the guide RNA, allowing for programmable ADAR2 editing (SEQ ID Nos. 756-760). FIG. 60B) Transcriptome-wide sites of significant RNA editing by BoxB-ADAR2_{DD}(E488Q) with a guide targeting Cluc and a non-targeting guide. The on-target Cluc site (254 A>G) is highlighted in orange. FIG. 60C) Transcriptome-wide sites of significant RNA editing by ADAR2 with a guide targeting Cluc and a non-targeting guide. The on-target Cluc site (254 A>G) is highlighted in orange.

[0125] FIG. 60D) Transcriptome-wide sites of significant RNA editing by REPAIRv1 with a guide targeting Cluc and a non-targeting guide. The on-target Cluc site (254 A>G) is highlighted in orange. The non-targeting guide is the same as in FIG. 50C. FIG. 60E) Quantitation of on-target editing rate percentage for BoxB-ADAR2_{DD}(E488Q), ADAR2, and REPAIRv1 for targeting guides against Cluc. FIG. 60F) Overlap of off-target sites between different targeting and non-targeting conditions for programmable ADAR systems. The values plotted are the percent of the maximum possible intersection of the two off-target data sets.

[0126] FIG. 61A-61C: Efficiency and specificity of dCas13b-ADAR2 mutants FIG. 61A) Quantitation of luciferase activity restoration by dCas13b-ADAR2_{DD}(E488Q) mutants for Cluc-targeting and non-targeting guides. Non-targeting guide is the same as in FIG. 50C. FIG. 61B) Relationship between the ratio of targeting and non-targeting guides and the number of RNA-editing off-targets as quantified by transcriptome-wide sequencing FIG. 61C) Quantification of number of transcriptome-wide off-target RNA editing sites versus on-target Cluc editing efficiency for dCas13b-ADAR2_{DD}(E488Q) mutants.

[0127] FIGS. 62A-62B: Transcriptome-wide specificity of RNA editing by dCas13b-ADAR2_{DD}(E488Q) mutants FIG. 62A) Transcriptome-wide sites of significant RNA editing by dCas13b-ADAR2_{DD}(E488Q) mutants with a guide targeting Cluc. The on-target Cluc site (254 A>G) is highlighted in orange. FIG. 62B) Transcriptome-wide sites of significant RNA editing by dCas13b-ADAR2_{DD}(E488Q) mutants with a non-targeting guide.

[0128] FIGS. 63A-63C: Characterization of motif biases in the off-targets of dCas13b-ADAR2_{DD}(E488Q) editing. FIG. 63A) For each dCas13b-ADAR2_{DD}(E488Q) mutant, the motif present across all A>G off-target edits in the transcriptome is shown. FIG. 63B) The distribution of off-target A>I edits per motif identity is shown for REPAIRv1 with targeting and non-targeting guide. FIG. 63C) The distribution of off-target A>I edits per motif identity is shown for REPAIRv2 with targeting and non-targeting guide.

[0129] FIGS. 64A-64F: Further characterization of REPAIRv1 and REPAIRv2 off-targets. FIG. 64A) Histogram of the number of off-targets per transcript for REPAIRv1.

[0130] FIG. 64B) Histogram of the number of off-targets per transcript for REPAIRv2. FIG. 64C) Variant effect prediction of REPAIRv1 off targets. FIG. 64D) Distribution of REPAIRv1 off targets in cancer-related genes. TSG, tumor suppressor gene. FIG. 64E) Variant effect prediction of REPAIRv2 off targets. FIG. 64F) Distribution of REPAIRv2 off targets in cancer-related genes.

[0131] FIGS. 65A-65C: RNA editing efficiency and specificity of REPAIRv1 and REPAIRv2. FIG. 65A) Quantification of percent editing of KRAS with KRAS-targeting guide 1 at the targeted adenosine and neighboring sites for REPAIRv1 and REPAIRv2. For each guide, the region of duplex RNA is outlined in red. Values represent mean+/−S.E.M. Non-targeting guide is the same as in FIG. 50C. FIG. 65B) Quantification of percent editing of KRAS with KRAS-targeting guide 3 at the targeted adenosine and neighboring sites for REPAIRv1 and REPAIRv2. Non-targeting guide is the same as in FIG. 50C. FIG. 65C) Quantification of percent editing of PPIB with PPIB-targeting guide 2 at the targeted adenosine and neighboring sites for REPAIRv1 and REPAIRv2. Non-targeting guide is the same as in FIG. 50C.

[0132] FIGS. 66A-66G: Demonstration of all potential codon changes with a A>I RNA editor. FIG. 66A) Table of all potential codon transitions enabled by A>I editing. FIG. 66B) A codon table demonstrating all the potential codon transitions enabled by A>I editing. Adapted and modified based on J. D. Watson, Molecular biology of the gene. (Pearson, Boston, ed. Seventh edition, 2014), pp. xxxiv, 872 pages (38). FIG. 66C) Model of REPAIR A to I editing of a precisely encoded nucleotide via a mismatch in the guide sequence. The A to I transition is mediated by the catalytic activity of the ADAR2 deaminase domain and will be read as a guanosine by translational machinery. The base change does not rely on endogenous repair machinery and is permanent for as long as the RNA molecule exists in the cell. FIG. 66D) REPAIR can be used for correction of Mendelian disease mutations. FIG. 66E) REPAIR can be used for multiplexed A to I editing of multiple variants for engineering pathways or modifying disease. Multiplexed guide delivery can be achieved by delivering a single CRISPR array expression cassette since the Cas13b enzyme processes its own array.

[0133] FIG. 66F) REPAIR can be used for modifying protein function through amino acid changes that affect enzyme domains, such as kinases. FIG. 66G) REPAIR can modulate splicing of transcripts by modifying the splice acceptor site.

[0134] FIG. 67: Additional truncations of Psp dCas13b.

[0135] FIG. 68: Potential effect of dosage on off target activity.

[0136] FIG. 69A-69D: Relative expression of Cas13 orthologs in mammalian cells and correlation of expression with interference activity. FIG. 69A) Expression of Cas13 orthologs as measured by msfGFP fluorescence. Cas13 orthologs C-terminally tagged with msfGFP were transfected into HEK293FT cells and their fluorescence measured 48 hours post transfection. FIGS. 69B-69C) Correlation of Cas13 expression to interference activity. The average RLU of two Gluc targeting guides for Cas13 orthologs, separated by subfamily, is plotted versus expression as determined by msfGFP fluorescence. The RLU for targeting guides are normalized to RLU for a non-targeting guide, whose value is set to 1. The non-targeting guide is the same as in FIG. 49B for Cas13b.

[0137] FIGS. 70A-70D: Comparison of RNA editing activity of dCas13b and REPAIRv1. FIG. 70A) Schematic of guides used to target the W85X mutation in the Cluc reporter (SEQ ID NO:820-827). FIG. 70B) Sequencing quantification of A to I editing for indicated guides transfected with dCas13b. For each guide, the region of duplex RNA is outlined in red. Values represent mean+/−S.E.M. Non-targeting guide is the same as in FIG. 50C. FIG. 70C) Sequencing quantification of A to I editing for indicated guides transfected with REPAIRv1. For each guide, the region of duplex RNA is outlined in red. Values represent mean+/−S.E.M. Non-targeting guide is the same as in FIG. 50C. FIG. 70D) Comparison of on-target A to I editing rates for dCas13b and dCas13b-ADAR2DD(E488Q) for guides tested in FIG. 70B and FIG. 70C. FIG. 70E) Influence of base identify opposite the targeted adenosine on luciferase activity restoration by REPAIRv1 (SEQ ID NO:754 and 755). Values represent mean+/−S.E.M.

[0138] FIGS. 71A-71D: REPAIRv1 editing activity evaluated without a guide and in comparison to ADAR2 deaminase domain alone. FIG. 71A) Quantification of A to I editing of the Cluc W85X mutation by REPAIRv1 with and without guide as well as the ADAR2 deaminase domain only without guide. Values represent mean+/−S.E.M. Non-targeting guide is the same as in FIG. 50C. FIG. 71B) Number of differentially expressed genes in the REPAIRv1 and ADAR2DD conditions from FIG. 71A. FIG. 71C) The number of significant off-targets from the REPAIRv1 and ADAR2DD conditions from FIG. 71A. FIG. 71D) Overlap of off-target A to I editing events between the REPAIRv1 and ADAR2DD conditions from FIG. 71A. The values plotted are the percent of the maximum possible intersection of the two off-target data sets.

[0139] FIGS. 72A-72B: Evaluation of off-target sequence similarity to the guide sequence. FIG. 72A) Distribution of the number of mismatches (hamming distance) between the targeting guide sequence and the off-target editing sites for REPAIRv1 with a Cluc targeting guide. FIG. 72B) Distribution of the number of mismatches (hamming distance) between the targeting guide sequence and the off-target editing sites for REPAIRv2 with a Cluc targeting guide.

[0140] FIGS. 73A-73B: Comparison of REPAIRv1, REPAIRv2, ADAR2 RNA targeting, and BoxB RNA targeting at two different doses of vector (150 ng and 10 ng effector). FIG. 73A) Quantification of RNA editing activity at the Cluc W85X (254 A>I) on-target editing site by REPAIRv1, REPAIRv2, ADAR2 RNA targeting, and BoxB RNA targeting approaches. Each of the four methods were tested with a targeting or non-targeting guide. Values shown are the mean of the three replicates. FIG. 73B) Quantification of RNA editing off-targets by REPAIRv1, REPAIRv2, ADAR2 RNA targeting, and BoxB RNA targeting approaches. Each of the four methods were tested with a targeting guide for the Cluc W85X (254 A>I) site or non-targeting guide. For REPAIR constructs, non-targeting guide is the same as in FIG. 50C.

[0141] FIGS. 74A-74D: RNA editing efficiency and genome-wide specificity of REPAIRv1 and REPAIRv2. FIG. 74A) Quantification of RNA editing activity at the PPIB guide 1 on-target editing site by REPAIRv1, REPAIRv2 with targeting and non-targeting guides. Values represent mean+/−S.E.M. FIG. 74B) Quantification of RNA editing activity at the PPIB guide 2 on-target editing site by REPAIRv1, REPAIRv2 with targeting and non-targeting guides. Values represent mean+/−S.E.M. FIG. 74C) Quantification of RNA editing off-targets by REPAIRv1 or REPAIRv2 with PPIB guide 1, PPIB guide 2, or non-targeting guide. FIG. 74D) Overlap of off-targets between REPAIRv1 for PPIB targeting, Clue targeting, and non-targeting guides. The values plotted are the percent of the maximum possible intersection of the two off-target data sets.

[0142] FIGS. 75A-75D: High coverage sequencing of REPAIRv1 and REPAIRv2 off-targets. FIG. 75A) Quantitation of off-target edits for REPAIRv1 and REPAIRv2 as a function of read depth with a total of 5 million reads (12.5× coverage), 15 million reads (37.5× coverage) and 50 million reads (125× coverage) per condition. FIG. 75B) Overlap of off-target sites at different read depths of the following conditions: REPAIRv1 versus REPAIRv1 (left), REPAIRv2 versus REPAIRv2 (middle), and REPAIRv1 versus REPAIRv2 (right). The values plotted are the percent of the maximum possible intersection of the two off-target data sets. FIG. 75C) Editing rate of off-target sites compared to the coverage (log 2(number of reads)) of the off-target for REPAIRv1 and REPAIRv2 targeting conditions at different read depths. FIG. 75D) Editing rate of off-target sites compared to the log 2(TPM+1) of the off-target gene expression for REPAIRv1 and REPAIRv2 targeting conditions at different read depths.

[0143] FIGS. 76A-76D: Quantification of REPAIRv2 activity and off-targets in the U2OS cell line. FIG. 76A) Transcriptome-wide sites of significant RNA editing by REPAIRv2 with a guide targeting Cluc in the U2OS cell line. The on-target Cluc site (254 A>I) is highlighted in orange. FIG. 76B) Transcriptome-wide sites of significant RNA editing by REPAIRv2 with a non-targeting guide in the U2OS cell line. FIG. 76C) The on-target editing rate at the Cluc W85X (254 A>I) by REPAIRv2 with a targeting guide or non-targeting guide in the U2OS cell line. FIG. 76D) Quantification of off-targets by REPAIRv2 with a guide targeting Cluc or non-targeting guide in the U2OS cell line.

[0144] FIG. 77: Provides a schematic of an example CRISPR genome-wide screen that may be used to identify pathologically activated phosphorylation sites for modification using the methods and systems disclosed herein.

[0145] FIG. 78: Provides a schematic of an example pathway involving oncogenic hyper phosphorylation that may be targeted using the embodiments disclosed herein.

[0146] FIG. 79: Top list of somatic mutation targets in Chinese DLBCLs. Genes affected by non-silent, somatically occurring mutations in at least 5 DLBCL samples in the discovery cohort (5% of altogether 96 cases) and considered to be significantly mutated (q value<0.1) by cancer driver gene prediction algorithms (Kan et al., Nature 466, 869-73 (2010)), MutSig (Lawrence, Nature 499, 214-8 (2013)) or Cancerdriverfml (Mularoni, Genome Biol 17, 128 (2016)), are displayed

[0147] FIGS. 80A-80D: Enhanced mutagenesis in HBsAg⁺ DLBCLs. (FIG. 80A-FIG. 80B) Comparison of the mutation load in whole genome (FIG. 80A) or coding genome (FIG. 80B) between HBsAg⁺ and HBsAg⁻ DLBCLs. (FIG. 80C) Major mutational signatures were identified according to the 96-substitution classifications from 60 Chinese DLBCLs characterized by WGS. (FIG. 80D) Signatures 2, 6 and 7 were enriched in the HBsAg⁺ samples. Mann-Whitney U test was used to calculate the p value.

[0148] FIG. 81: Somatic mutation spectrum in HBsAg⁺ and HBsAg⁻ DLBCLs. The frequency of non-silent mutations between HBsAg⁺(n=41) and HBsAg⁻ (n=163) DLBCLs that were sequenced by WES/WGS and/or lymphochip were compared by χ² test or Fisher's exact test (marked by *). Genes significantly different (p<0.05) between the two groups are bold.

[0149] FIG. 82: Key signaling pathways that are affected by frequent somatic mutations in HBsAg⁺ DLBCLs. Frequency of mutated genes in HBsAg⁺ and HBsAg⁻ DLBCLs from FIG. 3 are shown under the gene names.

[0150] FIGS. 83A-83C: BCL6, KLF2 and ZFP36L1 are preferentially mutated in HBsAg⁺ DLBCLs. (FIG. 83A) Diagram showing mutations identified in the BCL6 locus. Domains of BCL6 and a region containing translocation breakpoints identified in this report are indicated by horizontal lines. (FIG. 83B) Mutations identified in KLF2. (FIG. 83C) Mutations identified in ZFP36L1.

[0151] FIGS. 84A-84C: HBsAg⁺ DLBCLs displays a distinctive gene expression pattern. (FIG. 84A) HBsAg⁺ DLBCL tumors showed a distinctive gene expression profiling. The normalized expression levels were analyzed using the Qlucore Omics Explorer software. Significantly and differentially expressed genes (p<0.05) between HBsAg⁺ (n=21) and HBsAg⁻ (n=85) DLBCLs were used to draw the heatmap. (FIG. 84B) GSEA revealed pathway alterations in HBsAg⁺ tumors compared to that in HBsAg⁻ tumors. The normalized expression levels were performed using GSEA with 1000 sample permutations. Enrichments were considered significant if FDR q<0.25. (FIG. 84C) GSEAPreranked tool was used to analyze BCL6 and ZFP36L1-bound gene sets along the pre-ranked genes differentially expressed in HBsAg⁺ DLBCLs vs HBsAg⁻ DLBCLs. Genes were pre-ranked based on the correlation between the gene expression by comparing HBsAg⁺ and HBsAg⁻ DLBCLs. The enrichment was tested with 1000 gene-set permutations. Enrichments were considered significant if FDR q<0.05. ES, enrichment score. NES: normalized enrichment score.

[0152] FIGS. 85A-85C: Overall survival in HBsAg⁺ DLBCLs compared to HBsAg-DLBCLs. (FIG. 85A) the overall survival analysis of all DLBCL patients in our cohort. (FIG. 85B) The overall survival analysis of GCB or nonGCB DLBCLs. (FIG. 85C) the overall survival analysis of CHOP or RCHOP-treated DLBCL patients. Kaplan-Meier method was used and the differences between two groups were compared by log-rank test.

[0153] FIGS. 86A-86D: Genetic alterations in TP53, TP63 and TP73 genes. (FIG. 86A) Mutations identified in TP53, TP63 and TP73 in HBsAg⁺ and HBsAg⁻ DLBCLs. (FIG. 86B-FIG. 86C) Diagram showing mutations identified in TP63 and TP73 genes, respectively. (FIG. 86D) Alignment of the DNA binding domain (DBD) of TP53, TP63 and TP73. TA, transactivation; OD, oligomerization domain; SAM, sterile alpha motif (SEQ ID NO:776, 775, and 774).

[0154] FIG. 87: Detection of HBx antigen in DLBCLs by IHC. HBx protein was stained by anti-HBx antibody on FFPE samples derived from DLBCL tumor biopsies. HBx protein was expressed in the cytoplasm (*white arrow). Capsules and small vessels did not express HBx protein (*Black arrow).

[0155] FIG. 88: CREBBP-bound genes was significantly upregulated in HBsAg⁺ DLBCLs. GSEA plot illustrating the enrichment of CREBBP-bound genes in HBsAg⁺ DLBCLs compared to HBsAg⁻ DLBCLs. GSEA were performed with 1000 sample permutations. Enrichments were considered significant if FDR q<0.25. ES, enrichment score. NES: normalized enrichment score. FIGS. 89A-89C: Comparison of clinical and molecular features in DLBCLs with high or low HBV viral load. Patients were divided into two groups based on the HBV DNA quantitation in the serum: high, ≥2000 IU/ml (n=19); low, <2000 IU/ml (n=25). (FIG. 89A) Basic clinical data were compared. (FIG. 89B) Mutation frequency of genes mutated in at least 3 samples of either group was compared. Blue, nonsilent mutation. (FIG. 89C) Comparison of the mutation load in the coding region and the whole genome.

[0156] FIG. 90: Mutation pattern of DLBCLs with potentially occult HBV infection. The definition of occult HBV cases was based on: 1). HBsAg⁻ but HBV DNA positive in tumors. Totally five samples were included. 2). HBsAg⁻, HBcAb⁺ and HBsAb⁻. Totally five samples were included. Blue, nonsilent mutation.

[0157] FIGS. 91A-91E: (FIG. 91A) Mutations identified in TP53, TP63 and TP73 in HBsAg⁺ and HBsAg⁻ DLBCLs. (FIG. 91B-FIG. 91C) Diagram showing mutations identified in TP63 and TP73, respectively. (FIG. 91D) Alignment of the DNA binding domain (DBD) of TP53, TP63 and TP73. TA, transactivation; OD, oligomerization domain; SAM, sterile alpha motif (SEQ ID NO:774-776). (FIG. 91E) Characterization of transcriptional activity of mutant TP73. Data shown are from three independent experiments. ***p value<0.0001.

[0158] FIG. 92 shows mutations screened in 10 rounds for RESCUE.

[0159] FIG. 93 shows dose responses of the RESCUE mutants were tested on T motif.

[0160] FIG. 94 shows dose responses of the RESCUE mutants were tested on the C and G motif

[0161] FIGS. 95 and 96 show endogenous targeting with RESCUE v3, v6, v7, and v8.

[0162] FIG. 97 shows screening for mutations for RESCUE v9 was performed. (

[0163] FIG. 98 shows potential mutations for RESCUEv9 were identified.

[0164] FIG. 99 shows Base flip and motif testing were performed.

[0165] FIG. 100 shows effects of RESCUEv9 was tested on different motif flip.

[0166] FIG. 101 shows comparison between B6 and B12 with RESCUE v1 and v8 with 50 bp guides.

[0167] FIG. 102 shows comparison between B6 and B12 with RESCUE v1 and v8 with 30 bp guides.

[0168] The figures herein are for illustrative purposes only and are not necessarily drawn to scale.

### DETAILED DESCRIPTION

### General Definitions

[0169] Unless defined otherwise, technical and scientific terms used herein have the same meaning as commonly understood by one of ordinary skill in the art to which this disclosure pertains. Definitions of common terms and techniques in molecular biology may be found in Molecular Cloning: A Laboratory Manual, 2^{nd} edition (1989) (Sambrook, Fritsch, and Maniatis); Molecular Cloning: A Laboratory Manual, 4^{th} edition (2012) (Green and Sambrook); Current Protocols in Molecular Biology (1987) (F. M. Ausubel et al. eds.); the series Methods in Enzymology (Academic Press, Inc.): PCR 2: A Practical Approach (1995) (M. J. MacPherson, B. D. Hames, and G. R. Taylor eds.): Antibodies, A Laboraotry Manual (1988) (Harlow and Lane, eds.): Antibodies A Laboraotry Manual, 2^{nd} edition 2013 (E. A. Greenfield ed.); Animal Cell Culture (1987) (R. I. Freshney, ed.); Benjamin Lewin, Genes IX, published by Jones and Bartlet, 2008 (ISBN 0763752223); Kendrew et al. (eds.), The Encyclopedia of Molecular Biology, published by Blackwell Science Ltd., 1994 (ISBN 0632021829); Robert A. Meyers (ed.), Molecular Biology and Biotechnology: a Comprehensive Desk Reference, published by VCH Publishers, Inc., 1995 (ISBN 9780471185710); Singleton et al., Dictionary of Microbiology and Molecular Biology 2nd ed., J. Wiley & Sons (New York, N.Y. 1994), March, Advanced Organic Chemistry Reactions, Mechanisms and Structure 4th ed., John Wiley & Sons (New York, N.Y. 1992); and Marten H. Hofker and Jan van Deursen, Transgenic Mouse Methods and Protocols, 2nd edition (2011).

[0170] As used herein, the singular forms “a”, “an”, and “the” include both singular and plural referents unless the context clearly dictates otherwise.

[0171] The term “optional” or “optionally” means that the subsequent described event, circumstance or substituent may or may not occur, and that the description includes instances where the event or circumstance occurs and instances where it does not.

[0172] The recitation of numerical ranges by endpoints includes all numbers and fractions subsumed within the respective ranges, as well as the recited endpoints.

[0173] The terms “about” or “approximately” as used herein when referring to a measurable value such as a parameter, an amount, a temporal duration, and the like, are meant to encompass variations of and from the specified value, such as variations of +/−10% or less, +/−5% or less, +/−1% or less, and +/−0.1% or less of and from the specified value, insofar such variations are appropriate to perform in the disclosed invention. It is to be understood that the value to which the modifier “about” or “approximately” refers is itself also specifically, and preferably, disclosed.

[0174] C2c2 is now known as Cas13a. It will be understood that the term “C2c2” herein is used interchangeably with “Cas13a”.

[0175] As used herein, a “biological sample” may contain whole cells and/or live cells and/or cell debris. The biological sample may contain (or be derived from) a “bodily fluid”. The present invention encompasses embodiments wherein the bodily fluid is selected from amniotic fluid, aqueous humour, vitreous humour, bile, blood serum, breast milk, cerebrospinal fluid, cerumen (earwax), chyle, chyme, endolymph, perilymph, exudates, feces, female ejaculate, gastric acid, gastric juice, lymph, mucus (including nasal drainage and phlegm), pericardial fluid, peritoneal fluid, pleural fluid, pus, rheum, saliva, sebum (skin oil), semen, sputum, synovial fluid, sweat, tears, urine, vaginal secretion, vomit and mixtures of one or more thereof. Biological samples include cell cultures, bodily fluids, cell cultures from bodily fluids. Bodily fluids may be obtained from a mammal organism, for example by puncture, or other collecting or sampling procedures.

[0176] The terms “subject,” “individual,” and “patient” are used interchangeably herein to refer to a vertebrate, preferably a mammal, more preferably a human. Mammals include, but are not limited to, murines, simians, humans, farm animals, sport animals, and pets. Tissues, cells and their progeny of a biological entity obtained in vivo or cultured in vitro are also encompassed.

[0177] Various embodiments are described hereinafter. It should be noted that the specific embodiments are not intended as an exhaustive description or as a limitation to the broader aspects discussed herein. One aspect described in conjunction with a particular embodiment is not necessarily limited to that embodiment and can be practiced with any other embodiment(s). Reference throughout this specification to “one embodiment”, “an embodiment,” “an example embodiment,” means that a particular feature, structure or characteristic described in connection with the embodiment is included in at least one embodiment of the present invention. Thus, appearances of the phrases “in one embodiment,” “in an embodiment,” or “an example embodiment” in various places throughout this specification are not necessarily all referring to the same embodiment, but may. Furthermore, the particular features, structures or characteristics may be combined in any suitable manner, as would be apparent to a person skilled in the art from this disclosure, in one or more embodiments. Furthermore, while some embodiments described herein include some but not other features included in other embodiments, combinations of features of different embodiments are meant to be within the scope of the invention. For example, in the appended claims, any of the claimed embodiments can be used in any combination.

[0178] Reference is made to U.S. Provisional 62/351,662 and 62/351,803, filed on Jun. 17, 2016, U.S. Provisional 62/376,377, filed on Aug. 17, 2016, U.S. Provisional 62/410,366, filed Oct. 19, 2016, U.S. Provisional 62/432,240, filed Dec. 9, 2016, U.S. provisional 62/471,792 filed Mar. 15, 2017, and U.S. Provisional 62/484,786 filed Apr. 12, 2017. Reference is made to International PCT application PCT/US2017/038154, filed Jun. 19, 2017. Reference is made to U.S. Provisional 62/471,710, filed Mar. 15, 2017 (entitled, “Novel Cas13B Orthologues CRISPR Enzymes and Systems,” Attorney Ref: BI-10157 VP 47627.04.2149). Reference is further made to U.S. Provisional 62/432,553, filed Dec. 9, 2016, U.S. Provisional 62/456,645, filed Feb. 8, 2017, and U.S. Provisional 62/471,930, filed Mar. 15, 2017 (entitled “CRISPR Effector System Based Diagnostics,” Attorney Ref. BI-10121 BROD 0842P) and US Provisional To Be Assigned, filed Apr. 12, 2017 (entitled “CRISPR Effector System Based Diagnostics,” Attorney Ref. BI-10121 BROD 0843P). Reference is further made to U.S. Provisional 62/525,181 filed Jun. 26, 2017, U.S. Provisional 62/528,391 filed Jul. 3, 2017, U.S. Provisional 62/534,016 filed Jul. 18, 2017, U.S. Provisional 62/561,638 filed Sep. 21, 2017, U.S. Provisional 62/568,304 filed Oct. 4, 2017, and U.S. Provisional 62/574,158 filed Oct. 18, 2017.

[0179] All publications, published patent documents, and patent applications cited herein are hereby incorporated by reference to the same extent as though each individual publication, published patent document, or patent application was specifically and individually indicated as being incorporated by reference.

### Overview

[0180] The embodiments disclosed herein provide constructs, compositions, systems, and methods for site-directed RNA editing of RNA molecules. For example, the present invention provides methods for inhibiting intra and inter-cellular signaling pathways by modification of post-translation modification sites on select target RNA molecules. In certain example embodiments, the present invention provides methods for inhibiting intracellular phosphorylation of serine, threonine and tyrosine residues by editing the genetic codon of these amino acids by means of site-directed RNA editing or RNA molecules. Embodiments disclosed herein further provide methods of inhibiting pathological activation of cell signaling mediated by post-translational modifications, such as phosphorylation, which are involved in many diseases, including cancer, immunodeficiency, infectious diseases, inflammatory disorders and neurodegenerative disorders. The RNA-editing modification may be aimed at a single post-translation modification site of a single gene, but can also be multiplexed by targeting multiple sites on the same or different genes to increase efficacy. These approaches may be further combined with other treatments such as radiation, chemotherapy, targeted therapy based on antibodies or small molecules, and immune therapy, which may have a synergistic effect.

[0181] The embodiments disclosed herein provide systems, constructs, and methods for targeted base editing. In general the systems disclosed herein comprise a targeting component and a base editing component. The targeting component may function to specifically target the base editing component to a target nucleotide sequence in which one or more nucleotides are to be edited. The base editing component may then catalyze a chemical reaction to convert a first nucleotide in the target sequence to a second nucleotide. For example, the base editor may catalyze conversion of an adenine such that it is read as guanine by a cell's transcription or translation machinery, or vice versa. Likewise, the base editing component may catalyze conversion of cytidine to a uracil, or vice versa. In certain example embodiments, the base editor may be derived by starting with a known base editor, such as an adenine deaminase or cytodine deaminase, and modified using methods such as directed evolution to derive new functionalities. Directed evolution techniques are known in the art and may include those described in WO 2015/184016 “High-Throughput Assembly of Genetic Permuatations.”

### Compositions and Systems

[0182] The present disclosure provides systems for editing a nucleic acid such as a gene or a product thereof (e.g., the encoded RNA or protein). In some embodiments, the systems may be an engineered, non-naturally occurring system suitable for modifying post-translational modification sites on proteins encoded by a target nucleic acid sequence. In certain cases, the target nucleic acid sequence is RNA, e.g., mRNA. In certain cases, the target nucleic acid sequence is DNA, e.g., a gene or a fragment thereof. In general, the system may comprise one or more of a catalytic inactive (dead) Cas protein (e.g., dead Cas13), a nucleotide deaminase protein or catalytic domain thereof, and a guide molecule. In certain examples, the nucleotide deaminase protein may be a an adenosine deaminase. In certain examples, the nucleotide deaminase protein may be a cytidine deaminase. The guide sequence may be designed to have a degree of complementarity with a target sequence at one or more codon comprising an adenine or cytidine and that is post-translationally modified.

### AD-Functionalized CRISPR System

[0183] In some embodiments, the systems may be AD-functionalized CRISPR system. The term “AD-functionalized CRISPR system” as used here refers to a nucleic acid targeting and editing system comprising (a) a CRISPR-Cas protein, more particularly a Cas13 protein which is catalytically inactive; (b) a guide molecule which comprises a guide sequence; and (c) an adenosine deaminase protein or catalytic domain thereof; wherein the adenosine deaminase protein or catalytic domain thereof is covalently or non-covalently linked to the CRISPR-Cas protein or the guide molecule or is adapted to link thereto after delivery; wherein the guide sequence is substantially complementary to the target sequence but comprises a non-pairing C corresponding to the A being targeted for deamination, resulting in an A-C mismatch in an RNA duplex formed by the guide sequence and the target sequence. For application in eukaryotic cells, the CRISPR-Cas protein and/or the adenosine deaminase are preferably NLS-tagged.

[0184] In some embodiments, the components (a), (b) and (c) are delivered to the cell as a ribonucleoprotein complex. The ribonucleoprotein complex can be delivered via one or more lipid nanoparticles.

[0185] In some embodiments, the components (a), (b) and (c) are delivered to the cell as one or more RNA molecules, such as one or more guide RNAs and one or more mRNA molecules encoding the CRISPR-Cas protein, the adenosine deaminase protein, and optionally the adaptor protein. The RNA molecules can be delivered via one or more lipid nanoparticles.

[0186] In some embodiments, the components (a), (b) and (c) are delivered to the cell as one or more DNA molecules. In some embodiments, the one or more DNA molecules are comprised within one or more vectors such as viral vectors (e.g., AAV). In some embodiments, the one or more DNA molecules comprise one or more regulatory elements operably configured to express the CRISPR-Cas protein, the guide molecule, and the adenosine deaminase protein or catalytic domain thereof, optionally wherein the one or more regulatory elements comprise inducible promoters.

[0187] In some embodiments, the CRISPR-Cas protein is a dead Cas13. In some embodiments, the dead Cas13 is a dead Cas13a protein which comprises one or more mutations in the HEPN domain. In some embodiments, the dead Cas13a comprises a mutation corresponding to R474A and R1046A in Leptotrichia wadei (LwaCas13a). In some embodiments, the dead Cas13 is a dead Cas13b protein which comprises one or more of R116A, H121A, R1177A, H1182A of a Cas13b protein originating from Bergeyella zoohelcum ATCC 43767 or amino acid positions corresponding thereto of a Cas13b ortholog.

[0188] In some embodiments of the guide molecule is capable of hybridizing with a target sequence comprising the Adenine to be deaminated within an RNA sequence to form an RNA duplex which comprises a non-pairing Cytosine opposite to said Adenine. Upon RNA duplex formation, the guide molecule forms a complex with the Cas13 protein and directs the complex to bind the RNA polynucleotide at the target RNA sequence of interest. Details on the aspect of the guide of the AD-functionalized CRISPR-Cas system are provided herein below.

[0189] In some embodiments, a Cas13 guide RNA having a canonical length of, e.g. LawCas13 is used to form an RNA duplex with the target DNA. In some embodiments, a Cas13 guide molecule longer than the canonical length for, e.g. LawCas13a is used to form an RNA duplex with the target DNA including outside of the Cas13-guide RNA-target DNA complex.

[0190] In at least a first design, the AD-functionalized CRISPR system comprises (a) an adenosine deaminase fused or linked to a CRISPR-Cas protein, wherein the CRISPR-Cas protein is catalytically inactive, and (b) a guide molecule comprising a guide sequence designed to introduce an A-C mismatch in an RNA duplex formed between the guide sequence and the target sequence. In some embodiments, the CRISPR-Cas protein and/or the adenosine deaminase are NLS-tagged, on either the N- or C-terminus or both.

[0191] In at least a second design, the AD-functionalized CRISPR system comprises (a) a CRISPR-Cas protein that is catalytically inactive, (b) a guide molecule comprising a guide sequence designed to introduce an A-C mismatch in an RNA duplex formed between the guide sequence and the target sequence, and an aptamer sequence (e.g., MS2 RNA motif or PP7 RNA motif) capable of binding to an adaptor protein (e.g., MS2 coating protein or PP7 coat protein), and (c) an adenosine deaminase fused or linked to an adaptor protein, wherein the binding of the aptamer and the adaptor protein recruits the adenosine deaminase to the RNA duplex formed between the guide sequence and the target sequence for targeted deamination at the A of the A-C mismatch. In some embodiments, the adaptor protein and/or the adenosine deaminase are NLS-tagged, on either the N- or C-terminus or both. The CRISPR-Cas protein can also be NLS-tagged.

[0192] The use of different aptamers and corresponding adaptor proteins also allows orthogonal gene editing to be implemented. In one example in which adenosine deaminase are used in combination with cytidine deaminase for orthogonal gene editing/deamination, sgRNA targeting different loci are modified with distinct RNA loops in order to recruit MS2-adenosine deaminase and PP7-cytidine deaminase (or PP7-adenosine deaminase and MS2-cytidine deaminase), respectively, resulting in orthogonal deamination of A or C at the target loci of interested, respectively. PP7 is the RNA-binding coat protein of the bacteriophage Pseudomonas. Like MS2, it binds a specific RNA sequence and secondary structure. The PP7 RNA-recognition motif is distinct from that of MS2. Consequently, PP7 and MS2 can be multiplexed to mediate distinct effects at different genomic loci simultaneously. For example, an sgRNA targeting locus A can be modified with MS2 loops, recruiting MS2-adenosine deaminase, while another sgRNA targeting locus B can be modified with PP7 loops, recruiting PP7-cytidine deaminase. In the same cell, orthogonal, locus-specific modifications are thus realized. This principle can be extended to incorporate other orthogonal RNA-binding proteins.

[0193] In at least a third design, the AD-functionalized CRISPR system comprises (a) an adenosine deaminase inserted into an internal loop or unstructured region of a CRISPR-Cas protein, wherein the CRISPR-Cas protein is catalytically inactive or a nickase, and (b) a guide molecule comprising a guide sequence designed to introduce an A-C mismatch in an RNA duplex formed between the guide sequence and the target sequence.

[0194] The AD-functionalized CRISPR system described herein can be used to target a specific Adenine within an RNA polynucleotide sequence for deamination. For example, the guide molecule can form a complex with the CRISPR-Cas protein and directs the complex to bind a target RNA sequence in the RNA polynucleotide of interest. Because the guide sequence is designed to have a non-pairing C, the RNA duplex formed between the guide sequence and the target sequence comprises an A-C mismatch, which directs the adenosine deaminase to contact and deaminate the A opposite to the non-pairing C, converting it to a Inosine (I). Since Inosine (I) base pairs with C and functions like G in cellular process, the targeted deamination of A described herein are useful for correction of undesirable G-A and C-T mutations, as well as for obtaining desirable A-G and T-C mutations.

[0195] In some embodiments, the AD-functionalized CRISPR system is used for targeted deamination in an RNA polynucleotide molecule in vitro. In some embodiments, the AD-functionalized CRISPR system is used for targeted deamination in a DNA molecule within a cell. The cell can be a eukaryotic cell, such as an animal cell, a mammalian cell, a human, or a plant cell.

[0196] The invention also relates to a method for treating or preventing a disease by the targeted deamination using the AD-functionalized CRISPR system, wherein the deamination of the A, which remedies a disease caused by transcripts containing a pathogenic G-A or C-T point mutation. Examples of disease that can be treated or prevented with the present invention include cancer, Meier-Gorlin syndrome, Seckel syndrome 4, Joubert syndrome 5, Leber congenital amaurosis 10; Charcot-Marie-Tooth disease, type 2; Charcot-Marie-Tooth disease, type 2; Usher syndrome, type 2C; Spinocerebellar ataxia 28; Spinocerebellar ataxia 28; Spinocerebellar ataxia 28; Long QT syndrome 2; Sjögren-Larsson syndrome; Hereditary fructosuria; Hereditary fructosuria; Neuroblastoma; Neuroblastoma; Kallmann syndrome 1; Kallmann syndrome 1; Kallmann syndrome 1; Metachromatic leukodystrophy.

In particular embodiments, the invention thus comprises compositions for use in therapy. This implies that the methods can be performed in vivo, ex vivo or in vitro. In particular embodiments, the methods are not methods of treatment of the animal or human body or a method for modifying the germ line genetic identity of a human cell. In particular embodiments; when carrying out the method, the target RNA is not comprised within a human or animal cell. In particular embodiments, when the target is a human or animal target, the method is carried out ex vivo or in vitro.

### CRISPR-Cas Protein and Guide

[0197] In some embodiments, the system comprise one or more components of a CRISPR-Cas system. For example, the system may comprise a Cas protein, a guide molecule, or a combination thereof.

[0198] In the methods and systems of the present invention use is made of a CRISPR-Cas protein and corresponding guide molecule. More particularly, the CRISPR-Cas protein is a class 2 CRISPR-Cas protein. In certain embodiments, said CRISPR-Cas protein is a Cas13. The Cas13 may be Cas13a, Cas13b, or Cas13c. The CRISPR-Cas system does not require the generation of customized proteins to target specific sequences but rather a single Cas protein can be programmed by guide molecule to recognize a specific nucleic acid target, in other words the Cas enzyme protein can be recruited to a specific nucleic acid target locus of interest using said guide molecule.

### CRISPR-Cas Protein

[0199] In some embodiments, the systems may comprise a CRISPR-Cas protein. In certain examples, the CRISPR-Cas protein may be a catalytically inactive (dead) Cas protein. The catalytically inactive (dead) Cas protein may have impaired (e.g., reduced or no) nuclease activity. In some cases, the dead Cas protein may have nickase activity. In some cases, the dead Cas protein may be dead Cas13 protein. For example, the dead Cas13 may be dead Cas13a, dead Cas13b, or dead Cas13c. In some embodiments, the system may comprise a nucleotide sequence encoding the dead Cas protein.

[0200] In its unmodified form, a CRISPR-Cas protein is a catalytically active protein. This implies that upon formation of a nucleic acid-targeting complex (comprising a guide RNA hybridized to a target sequence one or both DNA strands in or near (e.g., within 1, 2, 3, 4, 5, 6, 7, 8, 9, 10, 20, 50, or more base pairs from) the target sequence is modified (e.g. cleaved). As used herein the term “sequence(s) associated with a target locus of interest” refers to sequences near the vicinity of the target sequence (e.g. within 1, 2, 3, 4, 5, 6, 7, 8, 9, 10, 20, 50, or more base pairs from the target sequence, wherein the target sequence is comprised within a target locus of interest). The unmodified catalytically active Cas13 protein generates a staggered cut, whereby the cut sites are typically within the target sequence. More particularly, the staggered cut is typically 13-23 nucleotides distal to the PAM. In particular embodiments, the cut on the non-target strand is 17 nucleotides downstream of the PAM (i.e. between nucleotide 17 and 18 downstream of the PAM), while the cut on the target strand (i.e. strand hybridizing with the guide sequence) occurs a further 4 nucleotides further from the sequence complementary to the PAM (this is 21 nucleotides upstream of the complement of the PAM on the 3′ strand or between nucleotide 21 and 22 upstream of the complement of the PAM).

[0201] In the methods according to the present invention, the CRISPR-Cas protein is preferably mutated with respect to a corresponding wild-type enzyme such that the mutated CRISPR-Cas protein lacks the ability to cleave one or both DNA strands of a target locus containing a target sequence. In particular embodiments, one or more catalytic domains of the Cas13 protein are mutated to produce a mutated Cas protein which cleaves only one DNA strand of a target sequence.

[0202] In particular embodiments, the CRISPR-Cas protein may be mutated with respect to a corresponding wild-type enzyme such that the mutated CRISPR-Cas protein lacks substantially all DNA cleavage activity. In some embodiments, a CRISPR-Cas protein may be considered to substantially lack all DNA and/or RNA cleavage activity when the cleavage activity of the mutated enzyme is about no more than 25%, 10%, 5%, 1%, 0.1%, 0.01%, or less of the nucleic acid cleavage activity of the non-mutated form of the enzyme; an example can be when the nucleic acid cleavage activity of the mutated form is nil or negligible as compared with the non-mutated form.

[0203] In certain embodiments of the methods provided herein the CRISPR-Cas protein is a mutated CRISPR-Cas protein which cleaves only one DNA strand, i.e. a nickase. More particularly, in the context of the present invention, the nickase ensures cleavage within the non-target sequence, i.e. the sequence which is on the opposite DNA strand of the target sequence and which is 3′ of the PAM sequence. By means of further guidance, and without limitation, an arginine-to-alanine substitution (R1226A) in the Nuc domain of Cas13 from Acidaminococcus sp. converts Cas13 from a nuclease that cleaves both strands to a nickase (cleaves a single strand). It will be understood by the skilled person that where the enzyme is not AsCas13, a mutation may be made at a residue in a corresponding position. In particular embodiments, the Cas13 is FnCas13 and the mutation is at the arginine at position R1218. In particular embodiments, the Cas13 is LbCas13 and the mutation is at the arginine at position R1138. In particular embodiments, the Cas13 is MbCas13 and the mutation is at the arginine at position R1293.

[0204] In certain embodiments of the methods provided herein the CRISPR-Cas protein has reduced or no catalytic activity. Where the CRISPR-Cas protein is a Cas13 protein, the mutations may include but are not limited to one or more mutations in the catalytic RuvC-like domain, such as D908A or E993A with reference to the positions in AsCas13.

[0205] In some embodiments, a CRISPR-Cas protein is considered to substantially lack all DNA cleavage activity when the DNA cleavage activity of the mutated enzyme is about no more than 25%, 10%, 5%, 1%, 0.1%, 0.01%, or less of the DNA cleavage activity of the non-mutated form of the enzyme; an example can be when the DNA cleavage activity of the mutated form is nil or negligible as compared with the non-mutated form. In these embodiments, the CRISPR-Cas protein is used as a generic DNA binding protein. The mutations may be artificially introduced mutations or gain- or loss-of-function mutations.

[0206] In addition to the mutations described above, the CRISPR-Cas protein may be additionally modified. As used herein, the term “modified” with regard to a CRISPR-Cas protein generally refers to a CRISPR-Cas protein having one or more modifications or mutations (including point mutations, truncations, insertions, deletions, chimeras, fusion proteins, etc.) compared to the wild type Cas protein from which it is derived. By derived is meant that the derived enzyme is largely based, in the sense of having a high degree of sequence homology with, a wildtype enzyme, but that it has been mutated (modified) in some way as known in the art or as described herein.

[0207] In some embodiments, the C-terminus of the Cas13 effector can be truncated. For example, at least 20 amino acids, at least 40 amino acids, at least 50 amino acids, at least 60 amino acids, at least 80 amino acids, at least 100 amino acids, at least 120 amino acids, at least 140 amino acids, at least 150 amino acids, at least 160 amino acids, at least 180 amino acids, at least 200 amino acids, at least 220 amino acids, at least 240 amino acids, at least 250 amino acids, at least 260 amino acids, or at least 300 amino acids, or at least 350 amino acids, or up to 120 amino acids, or up to 140 amino acids, or up to 160 amino acids, or up to 180 amino acids, or up to 200 amino acids, or up to 250 amino acids, or up to 300 amino acids, or up to 350 amino acids, or up to 400 amino acids, may be truncated at the C-terminus of the Cas13 effector. Specific examples of Cas13b truncations include C-terminal Δ984-1090, C-terminal Δ1026-1090, and C-terminal Δ1053-1090, C-terminal Δ934-1090, C-terminal Δ884-1090, C-terminal Δ834-1090, C-terminal Δ784-1090, and C-terminal Δ734-1090, wherein amino acid positions correspond to amino acid positions of Prevotella sp. P5-125 Cas13b protein. See also FIG. 67. In some cases, the truncated Cas13b is encoded by nt 1-984 of Prevotella sp. P5-125 Cas13b or the corresponding nt of a Cas13b orthologue or homologue. Examples of Cas13 truncations also include C-terminal Δ795-1095, wherein amino acid positions correspond to amino acid positions of Riemerella anatipestifer Cas13b protein. Examples of Cas13 truncations further include C-terminal Δ875-1175, C-terminal Δ895-1175, C-terminal Δ915-1175, C-terminal Δ935-1175, C-terminal Δ955-1175, C-terminal Δ975-1175, C-terminal Δ995-1175, C-terminal Δ1015-1175, C-terminal Δ1035-1175, C-terminal Δ1055-1175, C-terminal Δ1075-1175, C-terminal Δ1095-1175, C-terminal Δ1115-1175, C-terminal Δ1135-1175, C-terminal Δ1155-1175, wherein amino acid positions correspond to amino acid positions of Porphyromonas gulae Cas13b protein.

[0208] In some embodiments, the N-terminus of the Cas13 effector protein may be truncated. For example, at least 20 amino acids, at least 40 amino acids, at least 50 amino acids, at least 60 amino acids, at least 80 amino acids, at least 100 amino acids, at least 120 amino acids, at least 140 amino acids, at least 150 amino acids, at least 160 amino acids, at least 180 amino acids, at least 200 amino acids, at least 220 amino acids, at least 240 amino acids, at least 250 amino acids, at least 260 amino acids, or at least 300 amino acids, or at least 350 amino acids, or up to 120 amino acids, or up to 140 amino acids, or up to 160 amino acids, or up to 180 amino acids, or up to 200 amino acids, or up to 250 amino acids, or up to 300 amino acids, or up to 350 amino acids, or up to 400 amino acids, may be truncated at the N-terminus of the Cas13 effector. Examples of Cas13 truncations include N-terminal Δ1-125, N-terminal Δ1-88, or N-terminal Δ1-72, wherein amino acid positions of the truncations correspond to amino acid positions of Prevotella sp. P5-125 Cas13b protein.

[0209] In some embodiments, both the N- and the C-termini of the Cas13 effector protein may be truncated. For example, at least 20 amino acids may be truncated at the C-terminus of the Cas13 effector, and at least 20 amino acids, at least 40 amino acids, at least 60 amino acids, at least 80 amino acids, at least 100 amino acids, at least 120 amino acids, at least 140 amino acids, at least 160 amino acids, at least 180 amino acids, at least 200 amino acids, at least 220 amino acids, at least 240 amino acids, at least 260 amino acids, at least 300 amino acids, or at least 350 amino acids may be truncated at the N-terminus of the Cas13 effector. For example, at least 40 amino acids may be truncated at the C-terminus of the Cas13 effector, and at least 20 amino acids, at least 40 amino acids, at least 60 amino acids, at least 80 amino acids, at least 100 amino acids, at least 120 amino acids, at least 140 amino acids, at least 160 amino acids, at least 180 amino acids, at least 200 amino acids, at least 220 amino acids, at least 240 amino acids, at least 260 amino acids, at least 300 amino acids, or at least 350 amino acids may be truncated at the N-terminus of the Cas13 effector. For example, at least 60 amino acids may be truncated at the C-terminus of the Cas13 effector, and at least 20 amino acids, at least 40 amino acids, at least 60 amino acids, at least 80 amino acids, at least 100 amino acids, at least 120 amino acids, at least 140 amino acids, at least 160 amino acids, at least 180 amino acids, at least 200 amino acids, at least 220 amino acids, at least 240 amino acids, at least 260 amino acids, at least 300 amino acids, or at least 350 amino acids may be truncated at the N-terminus of the Cas13 effector. For example, at least 80 amino acids may be truncated at the C-terminus of the Cas13 effector, and at least 20 amino acids, at least 40 amino acids, at least 60 amino acids, at least 80 amino acids, at least 100 amino acids, at least 120 amino acids, at least 140 amino acids, at least 160 amino acids, at least 180 amino acids, at least 200 amino acids, at least 220 amino acids, at least 240 amino acids, at least 260 amino acids, at least 300 amino acids, or at least 350 amino acids may be truncated at the N-terminus of the Cas13 effector. For example, at least 100 amino acids may be truncated at the C-terminus of the Cas13 effector, and at least 20 amino acids, at least 40 amino acids, at least 60 amino acids, at least 80 amino acids, at least 100 amino acids, at least 120 amino acids, at least 140 amino acids, at least 160 amino acids, at least 180 amino acids, at least 200 amino acids, at least 220 amino acids, at least 240 amino acids, at least 260 amino acids, at least 300 amino acids, or at least 350 amino acids may be truncated at the N-terminus of the Cas13 effector. For example, at least 120 amino acids may be truncated at the C-terminus of the Cas13 effector, and at least 20 amino acids, at least 40 amino acids, at least 60 amino acids, at least 80 amino acids, at least 100 amino acids, at least 120 amino acids, at least 140 amino acids, at least 160 amino acids, at least 180 amino acids, at least 200 amino acids, at least 220 amino acids, at least 240 amino acids, at least 260 amino acids, at least 300 amino acids, or at least 350 amino acids may be truncated at the N-terminus of the Cas13 effector. For example, at least 140 amino acids may be truncated at the C-terminus of the Cas13 effector, and at least 20 amino acids, at least 40 amino acids, at least 60 amino acids, at least 80 amino acids, at least 100 amino acids, at least 120 amino acids, at least 140 amino acids, at least 160 amino acids, at least 180 amino acids, at least 200 amino acids, at least 220 amino acids, at least 240 amino acids, at least 260 amino acids, at least 300 amino acids, or at least 350 amino acids may be truncated at the N-terminus of the Cas13 effector. For example, at least 160 amino acids may be truncated at the C-terminus of the Cas13 effector, and at least 20 amino acids, at least 40 amino acids, at least 60 amino acids, at least 80 amino acids, at least 100 amino acids, at least 120 amino acids, at least 140 amino acids, at least 160 amino acids, at least 180 amino acids, at least 200 amino acids, at least 220 amino acids, at least 240 amino acids, at least 260 amino acids, at least 300 amino acids, or at least 350 amino acids may be truncated at the N-terminus of the Cas13 effector. For example, at least 180 amino acids may be truncated at the C-terminus of the Cas13 effector, and at least 20 amino acids, at least 40 amino acids, at least 60 amino acids, at least 80 amino acids, at least 100 amino acids, at least 120 amino acids, at least 140 amino acids, at least 160 amino acids, at least 180 amino acids, at least 200 amino acids, at least 220 amino acids, at least 240 amino acids, at least 260 amino acids, at least 300 amino acids, or at least 350 amino acids may be truncated at the N-terminus of the Cas13 effector. For example, at least 200 amino acids may be truncated at the C-terminus of the Cas13 effector, and at least 20 amino acids, at least 40 amino acids, at least 60 amino acids, at least 80 amino acids, at least 100 amino acids, at least 120 amino acids, at least 140 amino acids, at least 160 amino acids, at least 180 amino acids, at least 200 amino acids, at least 220 amino acids, at least 240 amino acids, at least 260 amino acids, at least 300 amino acids, or at least 350 amino acids may be truncated at the N-terminus of the Cas13 effector. For example, at least 220 amino acids may be truncated at the C-terminus of the Cas13 effector, and at least 20 amino acids, at least 40 amino acids, at least 60 amino acids, at least 80 amino acids, at least 100 amino acids, at least 120 amino acids, at least 140 amino acids, at least 160 amino acids, at least 180 amino acids, at least 200 amino acids, at least 220 amino acids, at least 240 amino acids, at least 260 amino acids, at least 300 amino acids, or at least 350 amino acids may be truncated at the N-terminus of the Cas13 effector. For example, at least 240 amino acids may be truncated at the C-terminus of the Cas13 effector, and at least 20 amino acids, at least 40 amino acids, at least 60 amino acids, at least 80 amino acids, at least 100 amino acids, at least 120 amino acids, at least 140 amino acids, at least 160 amino acids, at least 180 amino acids, at least 200 amino acids, at least 220 amino acids, at least 240 amino acids, at least 260 amino acids, at least 300 amino acids, or at least 350 amino acids may be truncated at the N-terminus of the Cas13 effector. For example, at least 260 amino acids may be truncated at the C-terminus of the Cas13 effector, and at least 20 amino acids, at least 40 amino acids, at least 60 amino acids, at least 80 amino acids, at least 100 amino acids, at least 120 amino acids, at least 140 amino acids, at least 160 amino acids, at least 180 amino acids, at least 200 amino acids, at least 220 amino acids, at least 240 amino acids, at least 260 amino acids, at least 300 amino acids, or at least 350 amino acids may be truncated at the N-terminus of the Cas13 effector. For example, at least 280 amino acids may be truncated at the C-terminus of the Cas13 effector, and at least 20 amino acids, at least 40 amino acids, at least 60 amino acids, at least 80 amino acids, at least 100 amino acids, at least 120 amino acids, at least 140 amino acids, at least 160 amino acids, at least 180 amino acids, at least 200 amino acids, at least 220 amino acids, at least 240 amino acids, at least 260 amino acids, at least 300 amino acids, or at least 350 amino acids may be truncated at the N-terminus of the Cas13 effector. For example, at least 300 amino acids may be truncated at the C-terminus of the Cas13 effector, and at least 20 amino acids, at least 40 amino acids, at least 60 amino acids, at least 80 amino acids, at least 100 amino acids, at least 120 amino acids, at least 140 amino acids, at least 160 amino acids, at least 180 amino acids, at least 200 amino acids, at least 220 amino acids, at least 240 amino acids, at least 260 amino acids, at least 300 amino acids, or at least 350 amino acids may be truncated at the N-terminus of the Cas13 effector. For example, at least 350 amino acids may be truncated at the C-terminus of the Cas13 effector, and at least 20 amino acids, at least 40 amino acids, at least 60 amino acids, at least 80 amino acids, at least 100 amino acids, at least 120 amino acids, at least 140 amino acids, at least 160 amino acids, at least 180 amino acids, at least 200 amino acids, at least 220 amino acids, at least 240 amino acids, at least 260 amino acids, at least 300 amino acids, or at least 350 amino acids may be truncated at the N-terminus of the Cas13 effector. For example, at least 20 amino acids may be truncated at the N-terminus of the Cas13 effector, and at least 20 amino acids, at least 40 amino acids, at least 60 amino acids, at least 80 amino acids, at least 100 amino acids, at least 120 amino acids, at least 140 amino acids, at least 160 amino acids, at least 180 amino acids, at least 200 amino acids, at least 220 amino acids, at least 240 amino acids, at least 260 amino acids, at least 300 amino acids, or at least 350 amino acids may be truncated at the C-terminus of the Cas13 effector. For example, at least 40 amino acids may be truncated at the N-terminus of the Cas13 effector, and at least 20 amino acids, at least 40 amino acids, at least 60 amino acids, at least 80 amino acids, at least 100 amino acids, at least 120 amino acids, at least 140 amino acids, at least 160 amino acids, at least 180 amino acids, at least 200 amino acids, at least 220 amino acids, at least 240 amino acids, at least 260 amino acids, at least 300 amino acids, or at least 350 amino acids may be truncated at the C-terminus of the Cas13 effector. For example, at least 60 amino acids may be truncated at the N-terminus of the Cas13 effector, and at least 20 amino acids, at least 40 amino acids, at least 60 amino acids, at least 80 amino acids, at least 100 amino acids, at least 120 amino acids, at least 140 amino acids, at least 160 amino acids, at least 180 amino acids, at least 200 amino acids, at least 220 amino acids, at least 240 amino acids, at least 260 amino acids, at least 300 amino acids, or at least 350 amino acids may be truncated at the C-terminus of the Cas13 effector. For example, at least 80 amino acids may be truncated at the N-terminus of the Cas13 effector, and at least 20 amino acids, at least 40 amino acids, at least 60 amino acids, at least 80 amino acids, at least 100 amino acids, at least 120 amino acids, at least 140 amino acids, at least 160 amino acids, at least 180 amino acids, at least 200 amino acids, at least 220 amino acids, at least 240 amino acids, at least 260 amino acids, at least 300 amino acids, or at least 350 amino acids may be truncated at the C-terminus of the Cas13 effector. For example, at least 100 amino acids may be truncated at the N-terminus of the Cas13 effector, and at least 20 amino acids, at least 40 amino acids, at least 60 amino acids, at least 80 amino acids, at least 100 amino acids, at least 120 amino acids, at least 140 amino acids, at least 160 amino acids, at least 180 amino acids, at least 200 amino acids, at least 220 amino acids, at least 240 amino acids, at least 260 amino acids, at least 300 amino acids, or at least 350 amino acids may be truncated at the C-terminus of the Cas13 effector. For example, at least 120 amino acids may be truncated at the N-terminus of the Cas13 effector, and at least 20 amino acids, at least 40 amino acids, at least 60 amino acids, at least 80 amino acids, at least 100 amino acids, at least 120 amino acids, at least 140 amino acids, at least 160 amino acids, at least 180 amino acids, at least 200 amino acids, at least 220 amino acids, at least 240 amino acids, at least 260 amino acids, at least 300 amino acids, or at least 350 amino acids may be truncated at the C-terminus of the Cas13 effector. For example, at least 140 amino acids may be truncated at the N-terminus of the Cas13 effector, and at least 20 amino acids, at least 40 amino acids, at least 60 amino acids, at least 80 amino acids, at least 100 amino acids, at least 120 amino acids, at least 140 amino acids, at least 160 amino acids, at least 180 amino acids, at least 200 amino acids, at least 220 amino acids, at least 240 amino acids, at least 260 amino acids, at least 300 amino acids, or at least 350 amino acids may be truncated at the C-terminus of the Cas13 effector. For example, at least 160 amino acids may be truncated at the N-terminus of the Cas13 effector, and at least 20 amino acids, at least 40 amino acids, at least 60 amino acids, at least 80 amino acids, at least 100 amino acids, at least 120 amino acids, at least 140 amino acids, at least 160 amino acids, at least 180 amino acids, at least 200 amino acids, at least 220 amino acids, at least 240 amino acids, at least 260 amino acids, at least 300 amino acids, or at least 350 amino acids may be truncated at the C-terminus of the Cas13 effector. For example, at least 180 amino acids may be truncated at the N-terminus of the Cas13 effector, and at least 20 amino acids, at least 40 amino acids, at least 60 amino acids, at least 80 amino acids, at least 100 amino acids, at least 120 amino acids, at least 140 amino acids, at least 160 amino acids, at least 180 amino acids, at least 200 amino acids, at least 220 amino acids, at least 240 amino acids, at least 260 amino acids, at least 300 amino acids, or at least 350 amino acids may be truncated at the C-terminus of the Cas13 effector. For example, at least 200 amino acids may be truncated at the N-terminus of the Cas13 effector, and at least 20 amino acids, at least 40 amino acids, at least 60 amino acids, at least 80 amino acids, at least 100 amino acids, at least 120 amino acids, at least 140 amino acids, at least 160 amino acids, at least 180 amino acids, at least 200 amino acids, at least 220 amino acids, at least 240 amino acids, at least 260 amino acids, at least 300 amino acids, or at least 350 amino acids may be truncated at the C-terminus of the Cas13 effector. For example, at least 220 amino acids may be truncated at the N-terminus of the Cas13 effector, and at least 20 amino acids, at least 40 amino acids, at least 60 amino acids, at least 80 amino acids, at least 100 amino acids, at least 120 amino acids, at least 140 amino acids, at least 160 amino acids, at least 180 amino acids, at least 200 amino acids, at least 220 amino acids, at least 240 amino acids, at least 260 amino acids, at least 300 amino acids, or at least 350 amino acids may be truncated at the C-terminus of the Cas13 effector. For example, at least 240 amino acids may be truncated at the N-terminus of the Cas13 effector, and at least 20 amino acids, at least 40 amino acids, at least 60 amino acids, at least 80 amino acids, at least 100 amino acids, at least 120 amino acids, at least 140 amino acids, at least 160 amino acids, at least 180 amino acids, at least 200 amino acids, at least 220 amino acids, at least 240 amino acids, at least 260 amino acids, at least 300 amino acids, or at least 350 amino acids may be truncated at the C-terminus of the Cas13 effector. For example, at least 260 amino acids may be truncated at the N-terminus of the Cas13 effector, and at least 20 amino acids, at least 40 amino acids, at least 60 amino acids, at least 80 amino acids, at least 100 amino acids, at least 120 amino acids, at least 140 amino acids, at least 160 amino acids, at least 180 amino acids, at least 200 amino acids, at least 220 amino acids, at least 240 amino acids, at least 260 amino acids, at least 300 amino acids, or at least 350 amino acids may be truncated at the C-terminus of the Cas13 effector. For example, at least 280 amino acids may be truncated at the N-terminus of the Cas13 effector, and at least 20 amino acids, at least 40 amino acids, at least 60 amino acids, at least 80 amino acids, at least 100 amino acids, at least 120 amino acids, at least 140 amino acids, at least 160 amino acids, at least 180 amino acids, at least 200 amino acids, at least 220 amino acids, at least 240 amino acids, at least 260 amino acids, at least 300 amino acids, or at least 350 amino acids may be truncated at the C-terminus of the Cas13 effector. For example, at least 300 amino acids may be truncated at the N-terminus of the Cas13 effector, and at least 20 amino acids, at least 40 amino acids, at least 60 amino acids, at least 80 amino acids, at least 100 amino acids, at least 120 amino acids, at least 140 amino acids, at least 160 amino acids, at least 180 amino acids, at least 200 amino acids, at least 220 amino acids, at least 240 amino acids, at least 260 amino acids, at least 300 amino acids, or at least 350 amino acids may be truncated at the C-terminus of the Cas13 effector. For example, at least 350 amino acids may be truncated at the N-terminus of the Cas13 effector, and at least 20 amino acids, at least 40 amino acids, at least 60 amino acids, at least 80 amino acids, at least 100 amino acids, at least 120 amino acids, at least 140 amino acids, at least 160 amino acids, at least 180 amino acids, at least 200 amino acids, at least 220 amino acids, at least 240 amino acids, at least 260 amino acids, at least 300 amino acids, or at least 350 amino acids may be truncated at the C-terminus of the Cas13 effector.

[0210] The additional modifications of the CRISPR-Cas protein may or may not cause an altered functionality. By means of example, and in particular with reference to CRISPR-Cas protein, modifications which do not result in an altered functionality include for instance codon optimization for expression into a particular host, or providing the nuclease with a particular marker (e.g. for visualization). Modifications with may result in altered functionality may also include mutations, including point mutations, insertions, deletions, truncations (including split nucleases), etc. Fusion proteins may without limitation include for instance fusions with heterologous domains or functional domains (e.g. localization signals, catalytic domains, etc.). In certain embodiments, various different modifications may be combined (e.g. a mutated nuclease which is catalytically inactive and which further is fused to a functional domain, such as for instance to induce DNA methylation or another nucleic acid modification, such as including without limitation a break (e.g. by a different nuclease (domain)), a mutation, a deletion, an insertion, a replacement, a ligation, a digestion, a break or a recombination). As used herein, “altered functionality” includes without limitation an altered specificity (e.g. altered target recognition, increased (e.g. “enhanced” Cas proteins) or decreased specificity, or altered PAM recognition), altered activity (e.g. increased or decreased catalytic activity, including catalytically inactive nucleases or nickases), and/or altered stability (e.g. fusions with destabilization domains). Suitable heterologous domains include without limitation a nuclease, a ligase, a repair protein, a methyltransferase, (viral) integrase, a recombinase, a transposase, an argonaute, a cytidine deaminase, a retron, a group II intron, a phosphatase, a phosphorylase, a sulpfurylase, a kinase, a polymerase, an exonuclease, etc. Examples of all these modifications are known in the art. It will be understood that a “modified” nuclease as referred to herein, and in particular a “modified” Cas or “modified” CRISPR-Cas system or complex preferably still has the capacity to interact with or bind to the polynucleic acid (e.g. in complex with the guide molecule). Such modified Cas protein can be combined with the deaminase protein or active domain thereof as described herein.

[0211] In certain embodiments, CRISPR-Cas protein may comprise one or more modifications resulting in enhanced activity and/or specificity, such as including mutating residues that stabilize the targeted or non-targeted strand (e.g. eCas9; “Rationally engineered Cas9 nucleases with improved specificity”, Slaymaker et al. (2016), Science, 351(6268):84-88, incorporated herewith in its entirety by reference). In certain embodiments, the altered or modified activity of the engineered CRISPR protein comprises increased targeting efficiency or decreased off-target binding. In certain embodiments, the altered activity of the engineered CRISPR protein comprises modified cleavage activity. In certain embodiments, the altered activity comprises increased cleavage activity as to the target polynucleotide loci. In certain embodiments, the altered activity comprises decreased cleavage activity as to the target polynucleotide loci. In certain embodiments, the altered activity comprises decreased cleavage activity as to off-target polynucleotide loci. In certain embodiments, the altered or modified activity of the modified nuclease comprises altered helicase kinetics. In certain embodiments, the modified nuclease comprises a modification that alters association of the protein with the nucleic acid molecule comprising RNA (in the case of a Cas protein), or a strand of the target polynucleotide loci, or a strand of off-target polynucleotide loci. In an aspect of the invention, the engineered CRISPR protein comprises a modification that alters formation of the CRISPR complex. In certain embodiments, the altered activity comprises increased cleavage activity as to off-target polynucleotide loci. Accordingly, in certain embodiments, there is increased specificity for target polynucleotide loci as compared to off-target polynucleotide loci. In other embodiments, there is reduced specificity for target polynucleotide loci as compared to off-target polynucleotide loci. In certain embodiments, the mutations result in decreased off-target effects (e.g. cleavage or binding properties, activity, or kinetics), such as in case for Cas proteins for instance resulting in a lower tolerance for mismatches between target and guide RNA. Other mutations may lead to increased off-target effects (e.g. cleavage or binding properties, activity, or kinetics). Other mutations may lead to increased or decreased on-target effects (e.g. cleavage or binding properties, activity, or kinetics). In certain embodiments, the mutations result in altered (e.g. increased or decreased) helicase activity, association or formation of the functional nuclease complex (e.g. CRISPR-Cas complex). In certain embodiments, as described above, the mutations result in an altered PAM recognition, i.e. a different PAM may be (in addition or in the alternative) be recognized, compared to the unmodified Cas protein. Particularly preferred mutations include positively charged residues and/or (evolutionary) conserved residues, such as conserved positively charged residues, in order to enhance specificity. In certain embodiments, such residues may be mutated to uncharged residues, such as alanine.

### Type-V CRISPR-Cas Protein

[0212] The application describes methods using Type-V CRISPR-Cas proteins. This is exemplified herein with Cas13, whereby a number of orthologs or homologs have been identified. It will be apparent to the skilled person that further orthologs or homologs can be identified and that any of the functionalities described herein may be engineered into other orthologs, including chimeric enzymes comprising fragments from multiple orthologs. Computational methods of identifying novel CRISPR-Cas loci are described in EP3009511 or US2016208243 and may comprise the following steps: detecting all contigs encoding the Cas1 protein; identifying all predicted protein coding genes within 20 kB of the cas1 gene; comparing the identified genes with Cas protein-specific profiles and predicting CRISPR arrays; selecting unclassified candidate CRISPR-Cas loci containing proteins larger than 500 amino acids (>500 aa); analyzing selected candidates using methods such as PSI-BLAST and HHPred to screen for known protein domains, thereby identifying novel Class 2 CRISPR-Cas loci (see also Schmakov et al. 2015, Mol Cell. 60(3):385-97). In addition to the above mentioned steps, additional analysis of the candidates may be conducted by searching metagenomics databases for additional homologs. Additionally or alternatively, to expand the search to non-autonomous CRISPR-Cas systems, the same procedure can be performed with the CRISPR array used as the seed.

[0213] In one aspect the detecting all contigs encoding the Cas1 protein is performed by GenemarkS which a gene prediction program as further described in “GeneMarkS: a self-training method for prediction of gene starts in microbial genomes. Implications for finding sequence motifs in regulatory regions.” John Besemer, Alexandre Lomsadze and Mark Borodovsky, Nucleic Acids Research (2001) 29, pp 2607-2618, herein incorporated by reference.

[0214] In one aspect the identifying all predicted protein coding genes is carried out by comparing the identified genes with Cas protein-specific profiles and annotating them according to NCBI Conserved Domain Database (CDD) which is a protein annotation resource that consists of a collection of well-annotated multiple sequence alignment models for ancient domains and full-length proteins. These are available as position-specific score matrices (PSSMs) for fast identification of conserved domains in protein sequences via RPS-BLAST. CDD content includes NCBI-curated domains, which use 3D-structure information to explicitly define domain boundaries and provide insights into sequence/structure/function relationships, as well as domain models imported from a number of external source databases (Pfam, SMART, COG, PRK, TIGRFAM). In a further aspect, CRISPR arrays were predicted using a PILER-CR program which is a public domain software for finding CRISPR repeats as described in “PILER-CR: fast and accurate identification of CRISPR repeats”, Edgar, R. C., BMC Bioinformatics, January 20; 8:18(2007), herein incorporated by reference.

[0215] In a further aspect, the case by case analysis is performed using PSI-BLAST (Position-Specific Iterative Basic Local Alignment Search Tool). PSI-BLAST derives a position-specific scoring matrix (PSSM) or profile from the multiple sequence alignment of sequences detected above a given score threshold using protein-protein BLAST. This PSSM is used to further search the database for new matches, and is updated for subsequent iterations with these newly detected sequences. Thus, PSI-BLAST provides a means of detecting distant relationships between proteins.

[0216] In another aspect, the case by case analysis is performed using HHpred, a method for sequence database searching and structure prediction that is as easy to use as BLAST or PSI-BLAST and that is at the same time much more sensitive in finding remote homologs. In fact, HHpred's sensitivity is competitive with the most powerful servers for structure prediction currently available. HHpred is the first server that is based on the pairwise comparison of profile hidden Markov models (HMMs). Whereas most conventional sequence search methods search sequence databases such as UniProt or the NR, HHpred searches alignment databases, like Pfam or SMART. This greatly simplifies the list of hits to a number of sequence families instead of a clutter of single sequences. All major publicly available profile and alignment databases are available through HHpred. HHpred accepts a single query sequence or a multiple alignment as input. Within only a few minutes it returns the search results in an easy-to-read format similar to that of PSI-BLAST. Search options include local or global alignment and scoring secondary structure similarity. HHpred can produce pairwise query-template sequence alignments, merged query-template multiple alignments (e.g. for transitive searches), as well as 3D structural models calculated by the MODELLER software from HHpred alignments.

### Deactivated Inactivated Cas13 Protein

[0217] Where the Cas13 protein has nuclease activity, the Cas13 protein may be modified to have diminished nuclease activity e.g., nuclease inactivation of at least 70%, at least 80%, at least 90%, at least 95%, at least 97%, or 100% as compared with the wild type enzyme; or to put in another way, a Cas13 enzyme having advantageously about 0% of the nuclease activity of the non-mutated or wild type Cas13 enzyme or CRISPR-Cas protein, or no more than about 3% or about 5% or about 10% of the nuclease activity of the non-mutated or wild type Cas13 enzyme, e.g. of the non-mutated or wild type Francisella novicida U112 (FnCas13), Acidaminococcus sp. BV3L6 (AsCas13), Lachnospiraceae bacterium ND2006 (LbCas13) or Moraxella bovoculi 237 (MbCas13 Cas13 enzyme or CRISPR-Cas protein. This is possible by introducing mutations into the nuclease domains of the Cas13 and orthologs thereof.

[0218] In preferred embodiments of the present invention at least one Cas13 protein is used which is a Cas13 nickase. More particularly, a Cas13 nickase is used which does not cleave the target strand but is capable of cleaving only the strand which is complementary to the target strand, i.e. the non-target DNA strand also referred to herein as the strand which is not complementary to the guide sequence. More particularly the Cas13 nickase is a Cas13 protein which comprises a mutation in the arginine at position 1226A in the Nuc domain of Cas13 from Acidaminococcus sp., or a corresponding position in a Cas13 ortholog. In further particular embodiments, the enzyme comprises an arginine-to-alanine substitution or an R1226A mutation. It will be understood by the skilled person that where the enzyme is not AsCas13, a mutation may be made at a residue in a corresponding position. In particular embodiments, the Cas13 is FnCas13 and the mutation is at the arginine at position R1218. In particular embodiments, the Cas13 is LbCas13 and the mutation is at the arginine at position R1138. In particular embodiments, the Cas13 is MbCas13 and the mutation is at the arginine at position R1293.

[0219] In certain embodiments, use is made additionally or alternatively of a CRISPR-Cas protein which is engineered and can comprise one or more mutations that reduce or eliminate a nuclease activity. The amino acid positions in the FnCas13p RuvC domain include but are not limited to D917A, E1006A, E1028A, D1227A, D1255A, N1257A, D917A, E1006A, E1028A, D1227A, D1255A and N1257A. Applicants have also identified a putative second nuclease domain which is most similar to PD-(D/E)XK nuclease superfamily and HincII endonuclease like. The point mutations to be generated in this putative nuclease domain to substantially reduce nuclease activity include but are not limited to N580A, N584A, T587A, W609A, D610A, K613A, E614A, D616A, K624A, D625A, K627A and Y629A. In a preferred embodiment, the mutation in the FnCas13p RuvC domain is D917A or E1006A, wherein the D917A or E1006A mutation completely inactivates the DNA cleavage activity of the FnCas13 effector protein. In another embodiment, the mutation in the FnCas13p RuvC domain is D1255A, wherein the mutated FnCas13 effector protein has significantly reduced nucleolytic activity.

[0220] More particularly, the inactivated Cas13 enzymes include enzymes mutated in amino acid positions As908, As993, As1263 of AsCas13 or corresponding positions in Cas13 orthologs. Additionally, the inactivated Cas13 enzymes include enzymes mutated in amino acid position Lb832, 925, 947 or 1180 of LbCas13 or corresponding positions in Cas13 orthologs. More particularly, the inactivated Cas13 enzymes include enzymes comprising one or more of mutations AsD908A, AsE993A, AsD1263A of AsCas13 or corresponding mutations in Cas13 orthologs. Additionally, the inactivated Cas13 enzymes include enzymes comprising one or more of mutations LbD832A, E925A, D947A or D1180A of LbCas13 or corresponding mutations in Cas13 orthologs.

[0221] Mutations can also be made at neighboring residues, e.g., at amino acids near those indicated above that participate in the nuclease activity. In some embodiments, only the RuvC domain is inactivated, and in other embodiments, another putative nuclease domain is inactivated, wherein the effector protein complex functions as a nickase and cleaves only one DNA strand. In a preferred embodiment, the other putative nuclease domain is a HincII-like endonuclease domain.

[0222] The inactivated Cas13 or Cas13 nickase may have associated (e.g., via fusion protein) one or more functional domains, including for example, a nucleotide deaminase such as an adenosine deaminase or cytidine deaminase or catalytic domain thereof. In some cases it is advantageous that additionally at least one heterologous NLS is provided. In some instances, it is advantageous to position the NLS at the N terminus. In general, the positioning of the one or more functional domain on the inactivated Cas13 or Cas13 nickase is one which allows for correct spatial orientation for the functional domain to affect the target with the attributed functional effect. For example, when the functional domain is an nucleotide deaminase catalytic domain thereof, the nucleotide deaminase catalytic domain is placed in a spatial orientation which allows it to contact and deaminate a target adenine. This may include positions other than the N-/C-terminus of Cas13. In some embodiments, the nucleotide deaminase protein or catalytic domain thereof is inserted into an internal loop of the dead Cas protein (e.g., dead Cas13).

### Use of Orthogonal Catalytically Inactive CRISPR-Cas Proteins

[0223] In particular embodiments, the Cas13 nickase is used in combination with an orthogonal catalytically inactive CRISPR-Cas protein to increase efficiency of said Cas13 nickase (as described in Chen et al. 2017, Nature Communications 8:14958; doi:10.1038/ncomms14958). More particularly, the orthogonal catalytically inactive CRISPR-Cas protein is characterized by a different PAM recognition site than the Cas13 nickase used in the AD-functionalized CRISPR system and the corresponding guide sequence is selected to bind to a target sequence proximal to that of the Cas13 nickase of the AD-functionalized CRISPR system. The orthogonal catalytically inactive CRISPR-Cas protein as used in the context of the present invention does not form part of the AD-functionalized CRISPR system but merely functions to increase the efficiency of said Cas13 nickase and is used in combination with a standard guide molecule as described in the art for said CRISPR-Cas protein. In particular embodiments, said orthogonal catalytically inactive CRISPR-Cas protein is a dead CRISPR-Cas protein, i.e. comprising one or more mutations which abolishes the nuclease activity of said CRISPR-Cas protein. In particular embodiments, the catalytically inactive orthogonal CRISPR-Cas protein is provided with two or more guide molecules which are capable of hybridizing to target sequences which are proximal to the target sequence of the Cas13 nickase. In particular embodiments, at least two guide molecules are used to target said catalytically inactive CRISPR-Cas protein, of which at least one guide molecule is capable of hybridizing to a target sequence 5″ of the target sequence of the Cas13 nickase and at least one guide molecule is capable of hybridizing to a target sequence 3′ of the target sequence of the Cas13 nickase of the AD-functionalized CRISPR system, whereby said one or more target sequences may be on the same or the opposite DNA strand as the target sequence of the Cas13 nickase. In particular embodiments, the guide sequences for the one or more guide molecules of the orthogonal catalytically inactive CRISPR-Cas protein are selected such that the target sequences are proximal to that of the guide molecule for the targeting of the AD-functionalized CRISPR, i.e. for the targeting of the Cas13 nickase. In particular embodiments, the one or more target sequences of the orthogonal catalytically inactive CRISPR-Cas enzyme are each separated from the target sequence of the Cas13 nickase by more than 5 but less than 450 basepairs. Optimal distances between the target sequences of the guides for use with the orthogonal catalytically inactive CRISPR-Cas protein and the target sequence of the AD-functionalized CRISPR system can be determined by the skilled person. In particular embodiments, the orthogonal CRISPR-Cas protein is a Class II, type II CRISPR protein. In particular embodiments, the orthogonal CRISPR-Cas protein is a Class II, type V CRISPR protein. In particular embodiments, the catalytically inactive orthogonal CRISPR-Cas protein In particular embodiments, the catalytically inactive orthogonal CRISPR-Cas protein has been modified to alter its PAM specificity as described elsewhere herein. In particular embodiments, the Cas13 protein nickase is a nickase which, by itself has limited activity in human cells, but which, in combination with an inactive orthogonal CRISPR-Cas protein and one or more corresponding proximal guides ensures the required nickase activity.

[0224] In some embodiments, the Cas13 protein is a Cas13a protein and the Cas13a comprises one or more mutations in the two HEPN domains, for example, at positions R474 and R1046 of Cas13a protein originating from Leptotrichia wadei or amino acid positions corresponding thereto of a Cas13a ortholog.

[0225] In some embodiments, the Cas13 protein is a Cas13b protein and the Cas13b comprises a mutation in one or more of positions R116, H121, R1177, and H1182, e.g., R116A, H121A, R1177A, and H1182A of Cas13b protein originating from Bergeyella zoohelcum ATCC 43767 or amino acid positions corresponding thereto of a Cas13b ortholog. In certain embodiments, the Cas13b comprises a mutation in one or more of positions R128, H133, R1053, and H1058, preferably H133 and H1058, preferably H133A and H1058A, of a Cas13b protein originating from Prevotella sp. P5-125 or amino acid positions corresponding thereto of a Cas13b ortholog.

### Modified Cas13 Enzymes

[0226] In particular embodiments, it is of interest to make use of an engineered Cas13 protein as defined herein, such as Cas13, wherein the protein complexes with a nucleic acid molecule comprising RNA to form a CRISPR complex, wherein when in the CRISPR complex, the nucleic acid molecule targets one or more target polynucleotide loci, the protein comprises at least one modification compared to unmodified Cas13 protein, and wherein the CRISPR complex comprising the modified protein has altered activity as compared to the complex comprising the unmodified Cas13 protein. It is to be understood that when referring herein to CRISPR “protein”, the Cas13 protein preferably is a modified CRISPR-Cas protein (e.g. having increased or decreased (or no) enzymatic activity, such as without limitation including Cas13. The term “CRISPR protein” may be used interchangeably with “CRISPR-Cas protein”, irrespective of whether the CRISPR protein has altered, such as increased or decreased (or no) enzymatic activity, compared to the wild type CRISPR protein.

[0227] Computational analysis of the primary structure of Cas13 nucleases reveals three distinct regions. First a C-terminal RuvC like domain, which is the only functional characterized domain. Second a N-terminal alpha-helical region and thirst a mixed alpha and beta region, located between the RuvC like domain and the alpha-helical region.

[0228] Several small stretches of unstructured regions are predicted within the Cas13 primary structure. Unstructured regions, which are exposed to the solvent and not conserved within different Cas13 orthologs, are preferred sides for splits and insertions of small protein sequences. In addition, these sides can be used to generate chimeric proteins between Cas13 orthologs.

[0229] Based on the above information, mutants can be generated which lead to inactivation of the enzyme or which modify the double strand nuclease to nickase activity. In alternative embodiments, this information is used to develop enzymes with reduced off-target effects (described elsewhere herein)

[0230] In certain of the above-described Cas13 enzymes, the enzyme is modified by mutation of one or more residues (in the RuvC domain) including but not limited to positions R909, R912, R930, R947, K949, R951, R955, K965, K968, K1000, K1002, R1003, K1009, K1017, K1022, K1029, K1035, K1054, K1072, K1086, R1094, K1095, K1109, K1118, K1142, K1150, K1158, K1159, R1220, R1226, R1242, and/or R1252 with reference to amino acid position numbering of AsCas13 (Acidaminococcus sp. BV3L6). In certain embodiments, the Cas13 enzymes comprising said one or more mutations have modified, more preferably increased specificity for the target.

[0231] In certain of the above-described non-naturally-occurring CRISPR-Cas proteins, the enzyme is modified by mutation of one or more residues (in the RAD50) domain including but not limited positions K324, K335, K337, R331, K369, K370, R386, R392, R393, K400, K404, K406, K408, K414, K429, K436, K438, K459, K460, K464, R670, K675, R681, K686, K689, R699, K705, R725, K729, K739, K748, and/or K752 with reference to amino acid position numbering of AsCas13 (Acidaminococcus sp. BV3L6). In certain embodiments, the Cas13 enzymes comprising said one or more mutations have modified, more preferably increased specificity for the target.

[0232] In certain of the Cas13 enzymes, the enzyme is modified by mutation of one or more residues including but not limited positions R912, T923, R947, K949, R951, R955, K965, K968, K1000, R1003, K1009, K1017, K1022, K1029, K1072, K1086, F1103, R1226, and/or R1252 with reference to amino acid position numbering of AsCas13 (Acidaminococcus sp. BV3L6). In certain embodiments, the Cas13 enzymes comprising said one or more mutations have modified, more preferably increased specificity for the target.

[0233] In certain embodiments, the Cas13 enzyme is modified by mutation of one or more residues including but not limited positions R833, R836, K847, K879, K881, R883, R887, K897, K900, K932, R935, K940, K948, K953, K960, K984, K1003, K1017, R1033, R1138, R1165, and/or R1252 with reference to amino acid position numbering of LbCas13 (Lachnospiraceae bacterium ND2006). In certain embodiments, the Cas13 enzymes comprising said one or more mutations have modified, more preferably increased specificity for the target.

[0234] In certain embodiments, the Cas13 enzyme is modified by mutation of one or more residues including but not limited positions K15, R18, K26, Q34, R43, K48, K51, R56, R84, K85, K87, N93, R103, N104, T118, K123, K134, R176, K177, R192, K200, K226, K273, K275, T291, R301, K307, K369, S404, V409, K414, K436, K438, K468, D482, K516, R518, K524, K530, K532, K548, K559, K570, R574, K592, D596, K603, K607, K613, C647, R681, K686, H720, K739, K748, K757, T766, K780, R790, P791, K796, K809, K815, T816, K860, R862, R863, K868, K897, R909, R912, T923, R947, K949, R951, R955, K965, K968, K1000, R1003, K1009, K1017, K1022, K1029, A1053, K1072, K1086, F1103, S1209, R1226, R1252, K1273, K1282, and/or K1288 with reference to amino acid position numbering of AsCas13 (Acidaminococcus sp. BV3L6). In certain embodiments, the Cas13 enzymes comprising said one or more mutations have modified, more preferably increased specificity for the target.

[0235] In certain embodiments, the enzyme is modified by mutation of one or more residues including but not limited positions K15, R18, K26, R34, R43, K48, K51, K56, K87, K88, D90, K96, K106, K107, K120, Q125, K143, R186, K187, R202, K210, K235, K296, K298, K314, K320, K326, K397, K444, K449, E454, A483, E491, K527, K541, K581, R583, K589, K595, K597, K613, K624, K635, K639, K656, K660, K667, K671, K677, K719, K725, K730, K763, K782, K791, R800, K809, K823, R833, K834, K839, K852, K858, K859, K869, K871, R872, K877, K905, R918, R921, K932, I960, K962, R964, R968, K978, K981, K1013, R1016, K1021, K1029, K1034, K1041, K1065, K1084, and/or K1098 with reference to amino acid position numbering of FnCas13 (Francisella novicida U112). In certain embodiments, the Cas13 enzymes comprising said one or more mutations have modified, more preferably increased specificity for the target.

[0236] In certain embodiments, the enzyme is modified by mutation of one or more residues including but not limited positions K15, R18, K26, K34, R43, K48, K51, R56, K83, K84, R86, K92, R102, K103, K116, K121, R158, E159, R174, R182, K206, K251, K253, K269, K271, K278, P342, K380, R385, K390, K415, K421, K457, K471, A506, R508, K514, K520, K522, K538, Y548, K560, K564, K580, K584, K591, K595, K601, K634, K640, R645, K679, K689, K707, T716, K725, R737, R747, R748, K753, K768, K774, K775, K785, K787, R788, Q793, K821, R833, R836, K847, K879, K881, R883, R887, K897, K900, K932, R935, K940, K948, K953, K960, K984, K1003, K1017, R1033, K1121, R1138, R1165, K1190, K1199, and/or K1208 with reference to amino acid position numbering of LbCas13 (Lachnospiraceae bacterium ND2006). In certain embodiments, the Cas13 enzymes comprising said one or more mutations have modified, more preferably increased specificity for the target.

[0237] In certain embodiments, the enzyme is modified by mutation of one or more residues including but not limited positions K14, R17, R25, K33, M42, Q47, K50, D55, K85, N86, K88, K94, R104, K105, K118, K123, K131, R174, K175, R190, R198, I221, K267, Q269, K285, K291, K297, K357, K403, K409, K414, K448, K460, K501, K515, K550, R552, K558, K564, K566, K582, K593, K604, K608, K623, K627, K633, K637, E643, K780, Y787, K792, K830, Q846, K858, K867, K876, K890, R900, K901, M906, K921, K927, K928, K937, K939, R940, K945, Q975, R987, R990, K1001, R1034, I1036, R1038, R1042, K1052, K1055, K1087, R1090, K1095, N1103, K1108, K1115, K1139, K1158, R1172, K1188, K1276, R1293, A1319, K1340, K1349, and/or K1356 with reference to amino acid position numbering of MbCas13 (Moraxella bovoculi 237). In certain embodiments, the Cas13 enzymes comprising said one or more mutations have modified, more preferably increased specificity for the target.

[0238] In one embodiment, the Cas13 protein is modified with a mutation at S1228 (e.g., S1228A) with reference to amino acid position numbering of AsCas13. See Yamano et al., Cell 165:949-962 (2016), which is incorporated herein by reference in its entirety.

[0239] In certain embodiments, the Cas13 protein has been modified to recognize a non-natural PAM, such as recognizing a PAM having a sequence or comprising a sequence YCN, YCV, AYV, TYV, RYN, RCN, TGYV, NTTN, TTN, TRTN, TYTV, TYCT, TYCN, TRTN, NTTN, TACT, TYCC, TRTC, TATV, NTTV, TTV, TSTG, TVTS, TYYS, TCYS, TBYS, TCYS, TNYS, TYYS, TNTN, TSTG, TTCC, TCCC, TATC, TGTG, TCTG, TYCV, or TCTC. In particular embodiments, said mutated Cas13 comprises one or more mutated amino acid residue at position 11, 12, 13, 14, 15, 16, 17, 34, 36, 39, 40, 43, 46, 47, 50, 54, 57, 58, 111, 126, 127, 128, 129, 130, 131, 132, 133, 134, 135, 136, 157, 158, 159, 160, 161, 162, 163, 164, 165, 166, 167, 168, 169, 170, 171, 172, 173, 174, 175, 176, 177, 178, 532, 533, 534, 535, 536, 537, 538, 539, 540, 541, 542, 543, 544, 545, 546, 547, 548, 549, 550, 551, 552, 553, 554, 555, 556, 565, 566, 567, 568, 569, 570, 571, 572, 573, 574, 575, 592, 593, 594, 595, 596, 597, 598, 599, 600, 601, 602, 603, 604, 605, 606, 607, 608, 609, 610, 611, 612, 613, 614, 615, 616, 617, 618, 619, 620, 626, 627, 628, 629, 630, 631, 632, 633, 634, 635, 636, 637, 638, 642, 643, 644, 645, 646, 647, 648, 649, 651, 652, 653, 654, 655, 656, 676, 679, 680, 682, 683, 684, 685, 686, 687, 688, 689, 690, 691, 692, 693, 707, 711, 714, 715, 716, 717, 718, 719, 720, 721, 722, 739, 765, 768, 769, 773, 777, 778, 779, 780, 781, 782, 783, 784, 785, 786, 871, 872, 873, 874, 875, 876, 877, 878, 879, 880, 881, 882, 883, 884, or 1048 of AsCas13 or a position corresponding thereto in a Cas13 ortholog; preferably, one or more mutated amino acid residue at position 130, 131, 132, 133, 134, 135, 136, 162, 163, 164, 165, 166, 167, 168, 169, 170, 171, 172, 173, 174, 175, 176, 177, 536, 537, 538, 539, 540, 541, 542, 543, 544, 545, 546, 547, 548, 549, 550, 551, 552, 570, 571, 572, 573, 595, 596, 597, 598, 599, 600, 601, 602, 603, 604, 605, 606, 607, 608, 609, 610, 611, 612, 613, 614, 615, 630, 631, 632, 646, 647, 648, 649, 650, 651, 652, 653, 683, 684, 685, 686, 687, 688, 689, or 690;

[0240] In certain embodiments, the Cas13 protein is modified to have increased activity, i.e. wider PAM specificity. In particular embodiments, the Cas13 protein is modified by mutation of one or more residues including but not limited positions 539, 542, 547, 548, 550, 551, 552, 167, 604, and/or 607 of AsCas13, or the corresponding position of an AsCas13 orthologue, homologue, or variant, preferably mutated amino acid residues at positions 542 or 542 and 607, wherein said mutations preferably are 542R and 607R, such as S542R and K607R; or preferably mutated amino acid residues at positions 542 and 548 (and optionally 552), wherein said mutations preferably are 542R and 548V (and optionally 552R), such as S542R and K548V (and optionally N552R); or at position 532, 538, 542, and/or 595 of LbCas13, or the corresponding position of an AsCas13 orthologue, homologue, or variant, preferably mutated amino acid residues at positions 532 or 532 and 595, wherein said mutations preferably are 532R and 595R, such as G532R and K595R; or preferably mutated amino acid residues at positions 532 and 538 (and optionally 542), wherein said mutations preferably are 532R and 538V (and optionally 542R), such as G532R and K538V (and optionally Y542R), most preferably wherein said mutations are S542R and K607R, S542R and K548V, or S542R, K548V and N552R of AsCas13.

### Orthologs of Cas13

[0241] The terms “orthologue” (also referred to as “ortholog” herein) and “homologue” (also referred to as “homolog” herein) are well known in the art. By means of further guidance, a “homologue” of a protein as used herein is a protein of the same species which performs the same or a similar function as the protein it is a homologue of Homologous proteins may but need not be structurally related, or are only partially structurally related. An “orthologue” of a protein as used herein is a protein of a different species which performs the same or a similar function as the protein it is an orthologue of. Orthologous proteins may but need not be structurally related, or are only partially structurally related. Homologs and orthologs may be identified by homology modelling (see, e.g., Greer, Science vol. 228 (1985) 1055, and Blundell et al. Eur J Biochem vol 172 (1988), 513) or “structural BLAST” (Dey F, Cliff Zhang Q, Petrey D, Honig B. Toward a “structural BLAST”: using structural relationships to infer function. Protein Sci. 2013 April; 22(4):359-66. doi: 10.1002/pro.2225.). See also Shmakov et al. (2015) for application in the field of CRISPR-Cas loci. Homologous proteins may but need not be structurally related, or are only partially structurally related.

[0242] The Cas13 gene is found in several diverse bacterial genomes, typically in the same locus with cas1, cas2, and cas4 genes and a CRISPR cassette (for example, FNFX1_1431-FNFX1_1428 of Francisella cf. novicida Fx1). Thus, the layout of this putative novel CRISPR-Cas system appears to be similar to that of type II-B. Furthermore, similar to Cas9, the Cas13 protein contains a readily identifiable C-terminal region that is homologous to the transposon ORF-B and includes an active RuvC-like nuclease, an arginine-rich region, and a Zn finger (absent in Cas9). However, unlike Cas9, Cas13 is also present in several genomes without a CRISPR-Cas context and its relatively high similarity with ORF-B suggests that it might be a transposon component. It was suggested that if this was a genuine CRISPR-Cas system and Cas13 is a functional analog of Cas9 it would be a novel CRISPR-Cas type, namely type V (See Annotation and Classification of CRISPR-Cas Systems. Makarova K S, Koonin E V. Methods Mol Biol. 2015; 1311:47-75). However, as described herein, Cas13 is denoted to be in subtype V-A to distinguish it from C2c1p which does not have an identical domain structure and is hence denoted to be in subtype V-B.

[0243] The present invention encompasses the use of a Cas13 effector protein, derived from a Cas13 locus denoted as subtype V-A. Herein such effector proteins are also referred to as “Cas13p”, e.g., a Cas13 protein (and such effector protein or Cas13 protein or protein derived from a Cas13 locus is also called “CRISPR-Cas protein”).

[0244] In particular embodiments, the effector protein is a Cas13 effector protein from an organism from a genus comprising Streptococcus, Campylobacter, Nitratifractor, Staphylococcus, Parvibaculum, Roseburia, Neisseria, Gluconacetobacter, Azospirillum, Sphaerochaeta, Lactobacillus, Eubacterium, Corynebacter, Carnobacterium, Rhodobacter, Listeria, Paludibacter, Clostridium, Lachnospiraceae, Clostridiaridium, Leptotrichia, Francisella, Legionella, Alicyclobacillus, Methanomethyophilus, Porphyromonas, Prevotella, Bacteroidetes, Helcococcus, Leptospira, Desulfovibrio, Desulfonatronum, Opitutaceae, Tuberibacillus, Bacillus, Brevibacilus, Methylobacterium, Butyvibrio, Perigrinibacterium, Pareubacterium, Moraxella, Thiomicrospira or Acidaminococcus. In particular embodiments, the Cas13 effector protein is selected from an organism from a genus selected from Eubacterium, Lachnospiraceae, Leptotrichia, Francisella, Methanomethyophilus, Porphyromonas, Prevotella, Leptospira, Butyvibrio, Perigrinibacterium, Pareubacterium, Moraxella, Thiomicrospira or Acidaminococcus In further particular embodiments, the Cas13 effector protein is from an organism selected from S. mutans, S. agalactiae, S. equisimilis, S. sanguinis, S. pneumonia; C. jejuni, C. coli; N. salsuginis, N. tergarcus; S. auricularis, S. carnosus; N. meningitides, N. gonorrhoeae; L. monocytogenes, L. ivanovii; C. botulinum, C. difficile, C. tetani, C. sordellii, L inadai, F. tularensis 1, P. albensis, L. bacterium, B. proteoclasticus, P. bacterium, P. crevioricanis, P. disiens and P. macacae.

[0245] The effector protein may comprise a chimeric effector protein comprising a first fragment from a first effector protein (e.g., a Cas13) ortholog and a second fragment from a second effector (e.g., a Cas13) protein ortholog, and wherein the first and second effector protein orthologs are different. At least one of the first and second effector protein (e.g., a Cas13) orthologs may comprise an effector protein (e.g., a Cas13) from an organism comprising Streptococcus, Campylobacter, Nitratifractor, Staphylococcus, Parvibaculum, Roseburia, Neisseria, Gluconacetobacter, Azospirillum, Sphaerochaeta, Lactobacillus, Eubacterium, Corynebacter, Carnobacterium, Rhodobacter, Listeria, Paludibacter, Clostridium, Lachnospiraceae, Clostridiaridium, Leptotrichia, Francisella, Legionella, Alicyclobacillus, Methanomethyophilus, Porphyromonas, Prevotella, Bacteroidetes, Helcococcus, Letospira, Desulfovibrio, Desulfonatronum, Opitutaceae, Tuberibacillus, Bacillus, Brevibacilus, Methylobacterium, Butyvibrio, Perigrinibacterium, Pareubacterium, Moraxella, Thiomicrospira or Acidaminococcus; e.g., a chimeric effector protein comprising a first fragment and a second fragment wherein each of the first and second fragments is selected from a Cas13 of an organism comprising Streptococcus, Campylobacter, Nitratifractor, Staphylococcus, Parvibaculum, Roseburia, Neisseria, Gluconacetobacter, Azospirillum, Sphaerochaeta, Lactobacillus, Eubacterium, Corynebacter, Carnobacterium, Rhodobacter, Listeria, Paludibacter, Clostridium, Lachnospiraceae, Clostridiaridium, Leptotrichia, Francisella, Legionella, Alicyclobacillus, Methanomethyophilus, Porphyromonas, Prevotella, Bacteroidetes, Helcococcus, Letospira, Desulfovibrio, Desulfonatronum, Opitutaceae, Tuberibacillus, Bacillus, Brevibacilus, Methylobacterium, Butyvibrio, Perigrinibacterium, Pareubacterium, Moraxella, Thiomicrospira or Acidaminococcus wherein the first and second fragments are not from the same bacteria; for instance a chimeric effector protein comprising a first fragment and a second fragment wherein each of the first and second fragments is selected from a Cas13 of S. mutans, S. agalactiae, S. equisimilis, S. sanguinis, S. pneumonia; C. jejuni, C. coli; N. salsuginis, N. tergarcus; S. auricularis, S. carnosus; N. meningitides, N. gonorrhoeae; L. monocytogenes, L. ivanovii; C. botulinum, C. difficile, C. tetani, C. sordellii; Francisella tularensis 1, Prevotella albensis, Lachnospiraceae bacterium MC2017 1, Butyrivibrio proteoclasticus, Peregrinibacteria bacterium GW2011_GWA2_33_10, Parcubacteria bacterium GW2011_GWC2_44_17, Smithella sp. SCADC, Acidaminococcus sp. BV3L6, Lachnospiraceae bacterium MA2020, Candidatus Methanoplasma termitum, Eubacterium eligens, Moraxella bovoculi 237, Leptospira inadai, Lachnospiraceae bacterium ND2006, Porphyromonas crevioricanis 3, Prevotella disiens and Porphyromonas macacae, wherein the first and second fragments are not from the same bacteria.

[0246] In a more preferred embodiment, the Cas13p is derived from a bacterial species selected from Francisella tularensis 1, Prevotella albensis, Lachnospiraceae bacterium MC2017 1, Butyrivibrio proteoclasticus, Peregrinibacteria bacterium GW2011_GWA2_33_10, Parcubacteria bacterium GW2011_GWC2_44_17, Smithella sp. SCADC, Acidaminococcus sp. BV3L6, Lachnospiraceae bacterium MA2020, Candidatus Methanoplasma termitum, Eubacterium eligens, Moraxella bovoculi 237, Moraxella bovoculi AAX08_00205, Moraxella bovoculi AAX11_00205, Butyrivibrio sp. NC3005, Thiomicrospira sp. XS5, Leptospira inadai, Lachnospiraceae bacterium ND2006, Porphyromonas crevioricanis 3, Prevotella disiens and Porphyromonas macacae. In certain embodiments, the Cas13p is derived from a bacterial species selected from Acidaminococcus sp. BV3L6, Lachnospiraceae bacterium MA2020. In certain embodiments, the effector protein is derived from a subspecies of Francisella tularensis 1, including but not limited to Francisella tularensis subsp. Novicida. In certain preferred embodiments, the Cas13p is derived from a bacterial species selected from Acidaminococcus sp. BV3L6, Lachnospiraceae bacterium ND2006, Lachnospiraceae bacterium MA2020, Moraxella bovoculi AAX08_00205, Moraxella bovoculi AAX11_00205, Butyrivibrio sp. NC3005, or Thiomicrospira sp. XS5.

[0247] In particular embodiments, the homologue or orthologue of Cas13 as referred to herein has a sequence homology or identity of at least 80%, more preferably at least 85%, even more preferably at least 90%, such as for instance at least 95% with the example Cas13 proteins disclosed herein. In further embodiments, the homologue or orthologue of Cas13 as referred to herein has a sequence identity of at least 80%, more preferably at least 85%, even more preferably at least 90%, such as for instance at least 95% with the wild type Cas13. Where the Cas13 has one or more mutations (mutated), the homologue or orthologue of said Cas13 as referred to herein has a sequence identity of at least 80%, more preferably at least 85%, even more preferably at least 90%, such as for instance at least 95% with the mutated Cas13.

[0248] In an embodiment, the Cas13 protein may be an ortholog of an organism of a genus which includes, but is not limited to Acidaminococcus sp, Lachnospiraceae bacterium or Moraxella bovoculi; in particular embodiments, the type V Cas protein may be an ortholog of an organism of a species which includes, but is not limited to Acidaminococcus sp. BV3L6; Lachnospiraceae bacterium ND2006 (LbCas13) or Moraxella bovoculi 237. In particular embodiments, the homologue or orthologue of Cas13 as referred to herein has a sequence homology or identity of at least 80%, more preferably at least 85%, even more preferably at least 90%, such as for instance at least 95% with one or more of the Cas13 sequences disclosed herein. In further embodiments, the homologue or orthologue of Cas13 as referred to herein has a sequence identity of at least 80%, more preferably at least 85%, even more preferably at least 90%, such as for instance at least 95% with the wild type FnCas13, AsCas13 or LbCas13.

[0249] In particular embodiments, the Cas13 protein of the invention has a sequence homology or identity of at least 60%, more particularly at least 70, such as at least 80%, more preferably at least 85%, even more preferably at least 90%, such as for instance at least 95% with FnCas13, AsCas13 or LbCas13. In further embodiments, the Cas13 protein as referred to herein has a sequence identity of at least 60%, such as at least 70%, more particularly at least 80%, more preferably at least 85%, even more preferably at least 90%, such as for instance at least 95% with the wild type AsCas13 or LbCas13. In particular embodiments, the Cas13 protein of the present invention has less than 60% sequence identity with FnCas13. The skilled person will understand that this includes truncated forms of the Cas13 protein whereby the sequence identity is determined over the length of the truncated form. In particular embodiments, the Cas13 enzyme is not FnCas13.

### Example Cas Proteins

[0250] In certain example embodiments, the CRISPR Cas protein is selected from Table 1.

TABLE 1

| C2c2 orthologue | Code | Multi Letter |
|---|---|---|
| Leptotrichia shahii | C2-2 | Lsh |
| L wadei F0279 (Lw2) | C2-3 | Lw2 |
| Listeria seeligeri | C2-4 | Lse |
| Lachnospiraceae bacterium MA2020 | C2-5 | LbM |
| Lachnospiraceae bacterium NK4A179 | C2-6 | LbNK179 |
| [Clostridium] aminophilum DSM 10710 | C2-7 | Ca |
| Carnobacterium gallinarum DSM 4847 | C2-8 | Cg |
| Carnobacterium gallinarum DSM 4847 | C2-9 | Cg2 |
| Paludibacter propionicigenes WB4 | C2-10 | Pp |
| Listeria weihenstephanensis FSL R9-0317 | C2-11 | Lwei |
| Listeriaceae bacterium FSL M6-0635 | C2-12 | LbFSL |
| Leptotrichia wadei F0279 | C2-13 | Lw |
| Rhodobacter capsulatus SB 1003 | C2-14 | Rc |
| Rhodobacter capsulatus R121 | C2-15 | Rc |
| Rhodobacter capsulatus DE442 | C2-16 | Rc |

[0251] In certain example embodiments, the CRISPR effector protein is a Cas13a protein selected from Table 2

TABLE 2

| | | |
|---|---|---|
| c2c2-5 | 1 | Lachnospiraceae bacterium MA2020 SEQ ID No. 34) |
| c2c2-6 | 2 | Lachnospiraceae bacterium NK4A179 SEQ ID No. 35) |
| c2c2-7 | 3 | [Clostridium] aminophilum DSM 10710 SEQ ID No. 36) |
| c2c2-8 | 5 | Carnobacterium gallinarum DSM 4847 (SEQ ID No. 37) |
| c2c2-9 | 6 | Carnobacterium gallinarum DSM 4847 (SEQ ID No. 38) |
| c2c2-10 | 7 | Paludibacter propionicigenes WB4 (SEQ ID No. 39) |
| c2c2-11 | 9 | Listeria weihenstephanensis FSL R9-0317 (SEQ ID No. 40) |
| c2c2-12 | 10 | Listeriaceae bacterium FSL M6-0635 = Listeria newyorkensis FSL M6-0635 (SEQ ID No. 41) |
| c2c2-13 | 12 | Leptotrichia wadei F0279 (SEQ ID No. 42) |
| c2c2-14 | 15 | Rhodobacter capsulatus SB 1003 (SEQ ID No. 43) |
| c2c2-15 | 16 | Rhodobacter capsulatus R121 (SEQ ID No. 44) |
| c2c2-16 | 17 | Rhodobacter capsulatus DE442 (SEQ ID No. 45) |
| c2c2-2 | | (SEQ ID No. 46) |
| c2c2-3 | | L wadei (Lw2) (SEQ ID No. 47) |
| c2c2-4 | | Listeria seeligeri (SEQ ID No. 48) |
| C2-17 | | Leptotrichia buccalis C-1013-b (SEQ ID No. 49) |
| C2-18 | | Herbinix hemicellulosilytica (SEQ ID No. 50) |
| C2-19 | | [Eubacterium] rectale (SEQ ID No. 51) |
| C2-20 | | Eubacteriaceae bacterium CHKCI004 (SEQ ID No. 52) |
| C2-21 | | Blautia sp. Marseille-P2398 (SEQ ID No. 53) |
| C2-22 | | Leptotrichia sp. oral taxon 879 str. F0557 (SEQ ID No. 54) |
| C2-23 | | Lachnospiraceae bacterium NK4A144 (SEQ ID No. 55) |
| C2-24 | | Chloroflexus aggregans (SEQ ID No. 56) |
| C2-25 | | Demequina aurantiaca (SEQ ID No. 57) |
| C2-26 | | Thalassospira sp. TSL5-1 (SEQ ID No. 58) |
| C2-27 | | SAMN04487830_13920 [Pseudobutyrivibrio sp. OR37] (SEQ ID No. 59) |
| C2-28 | | SAMN02910398_00008 [Butyrivibrio sp. YAB3001] (SEQ ID No. 60) |
| C2-29 | | Blautia sp. Marseille-P2398 (SEQ ID No. 61) |
| C2-30 | | Leptotrichia sp. Marseille-P3007 (SEQ ID No. 62) |
| C2-31 | | Bacteroides ihuae (SEQ ID No. 63) |
| C2-32 | | SAMN05216357_1045 [Porphyromonadaceae bacterium KH3CP3RA] (SEQ ID No. 64) |
| C2-33 | | Listeria riparia (SEQ ID No. 65) |
| C2-34 | | Insolitispirillum peregrinum (SEQ ID No. 66) |

[0252] In certain example embodiments, the CRISPR effector protein is a Cas13b protein selected from Table 3.

TABLE 3

| | |
|---|---|
| Bergeyella zoohelcum (SEQ ID No. 67) | 1 |
| Prevotella intermedia (SEQ ID No. 68) | 2 |
| Prevotella buccae (SEQ ID No. 69) | 3 |
| Porphyromonas gingivalis (SEQ ID No. 70) | 4 |
| Bacteroides pyogenes (SEQ ID No. 71) | 5 |
| Alistipes sp. ZOR0009 (SEQ ID No. 72) | 6 |
| Prevotella sp. MA2016 (SEQ ID No. 73) | 7a |
| Prevotella sp. MA2016 (SEQ ID No. 74) | 7b |
| Riemerella anatipestifer (SEQ ID No. 75) | 8 |
| Prevotella aurantiaca (SEQ ID No. 76) | 9 |
| Prevotella saccharolytica (SEQ ID No. 77) | 10 |
| HMPREF9712_03108 [Myroides odoratimimus CCUG 10230] (SEQ ID No. 78) | 11 |
| Prevotella intermedia (SEQ ID No. 79) | 12 |
| Capnocytophaga canimorsus (SEQ ID No. 80) | 13 |
| Porphyromonas gulae (SEQ ID No. 81) | 14 |
| Prevotella sp. P5-125 (SEQ ID No. 82) | 15 |
| Flavobacterium branchiophilum (SEQ ID No. 83) | 16 |
| Myroides odoratimimus (SEQ ID No. 84) | 17 |
| Flavobacterium columnare (SEQ ID No. 85) | 18 |
| Porphyromonas gingivalis (SEQ ID No. 86) | 19 |
| Porphyromonas sp. COT-052 0H4946 (SEQ ID No. 87) | 20 |
| Prevotella intermedia (SEQ ID No. 88) | 21 |
| PIN17_0200 [Prevotella intermedia 17] (SEQ ID No. 89) | AFJ07523 |
| Prevotella intermedia (SEQ ID No. 90) | BAU18623 |
| HMPREF6485_0083 [Prevotella buccae ATCC 33574] (SEQ ID No. 91) | EFU31981 |
| HMPREF9144_1146 [Prevotella pallens ATCC 700821] (SEQ ID No. 92) | EGQ18444 |
| HMPREF9714_02132 [Myroides odoratimimus CCUG 12901] (SEQ ID No. 93) | EHO08761 |
| HMPREF9711_00870 [Myroides odoratimimus CCUG 3837] (SEQ ID No.94) | EKB06014 |
| HMPREF9699_02005 [Bergeyella zoohelcum ATCC 43767] (SEQ ID No. 95) | EKB54193 |
| HMPREF9151_01387 [Prevotella saccharolytica F0055] (SEQ ID No. 96) | EKY00089 |
| A343_1752 [Porphyromonas gingivalis JCVI SC001] (SEQ ID No. 97) | EOA10535 |
| HMPREF1981_03090 [Bacteroides pyogenes F0041] (SEQ ID No. 98) | ERI81700 |
| HMPREF1553_02065 [Porphyromonas gingivalis F0568] (SEQ ID No. 99) | ERJ65637 |
| HMPREF1988_01768 [Porphyromonas gingivalis F0185] (SEQ ID No. 100) | ERJ81987 |
| HMPREF1990_01800 [Porphyromonas gingivalis W4087] (SEQ ID No. 101) | ERJ87335 |
| M573_117042 [Prevotella intermedia ZT] (SEQ ID No. 102) | KJJ86756 |
| A2033_10205 [Bacteroidetes bacterium GWA2_31_9] (SEQ ID No. 103) | OFX18020.1 |
| SAMN05421542_0666 [Chryseobacterium jejuense] (SEQ ID No. 104) | SDI27289.1 |
| SAMN05444360_11366 [Chryseobacterium carnipullorum] (SEQ ID No. 105) | SHM52812.1 |
| SAMN05421786_1011119 [Chryseobacterium ureilyticum] (SEQ ID No. 106) | SIS70481.1 |
| Prevotella buccae (SEQ ID No. 107) | WP_004343581 |
| Porphyromonas gingivalis (SEQ ID No. 108) | WP_005873511 |
| Porphyromonas gingivalis (SEQ ID No. 109) | WP_005874195 |
| Prevotella pallens (SEQ ID No. 110) | WP_006044833 |
| Myroides odoratimimus (SEQ ID No. 111) | WP_006261414 |
| Myroides odoratimimus (SEQ ID No. 112) | WP_006265509 |
| Prevotella sp. M5X73 (SEQ ID No. 113) | WP_007412163 |
| Porphyromonas gingivalis (SEQ ID No. 114) | WP_012458414 |
| Paludibacter propionicigenes (SEQ ID No. 115) | WP_013446107 |
| Porphyromonas gingivalis (SEQ ID No. 116) | WP_013816155 |
| Flavobacterium columnare (SEQ ID No. 117) | WP_014165541 |
| Psychroflexus torquis (SEQ ID No. 118) | WP_015024765 |
| Riemerella anatipestifer (SEQ ID No. 119) | WP_015345620 |
| Prevotella pleuritidis (SEQ ID No. 120) | WP_021584635 |
| Porphyromonas gingivalis (SEQ ID No. 121) | WP_021663197 |
| Porphyromonas gingivalis (SEQ ID No. 122) | WP_021665475 |
| Porphyromonas gingivalis (SEQ ID No. 123) | WP_021677657 |
| Porphyromonas gingivalis (SEQ ID No. 124) | WP_021680012 |
| Porphyromonas gingivalis (SEQ ID No. 125) | WP_023846767 |
| Prevotella falsenii (SEQ ID No. 126) | WP_036884929 |
| Prevotella pleuritidis (SEQ ID No. 127) | WP_036931485 |
| [Porphyromonas gingivalis (SEQ ID No. 128) | WP_039417390 |
| Porphyromonas gulae (SEQ ID No. 129) | WP_039418912 |
| Porphyromonas gulae (SEQ ID No. 130) | WP_039419792 |
| Porphyromonas gulae (SEQ ID No. 131) | WP_039426176 |
| Porphyromonas gulae (SEQ ID No. 132) | WP_039431778 |
| Porphyromonas gulae (SEQ ID No. 133) | WP_039437199 |
| Porphyromonas gulae (SEQ ID No. 134) | WP_039442171 |
| Porphyromonas gulae (SEQ ID No. 135) | WP_039445055 |
| Capnocytophaga cynodegmi (SEQ ID No. 136) | WP_041989581 |
| Prevotella sp. P5-119 (SEQ ID No. 137) | WP_042518169 |
| Prevotella sp. P4-76 (SEQ ID No. 138) | WP_044072147 |
| Prevotella sp. P5-60 (SEQ ID No. 139) | WP_044074780 |
| Phaeodactylibacter xiamenensis (SEQ ID No. 140) | WP_044218239 |
| Flavobacterium sp. 316 (SEQ ID No. 141) | WP_045968377 |
| Porphyromonas gulae (SEQ ID No. 142) | WP_046201018 |
| WP_047431796 (SEQ ID No. 143) | Chryseobacterium |
| | sp. YR477 |
| Riemerella anatipestifer (SEQ ID No. 144) | WP_049354263 |
| Porphyromonas gingivalis (SEQ ID No. 145) | WP_052912312 |
| Porphyromonas gingivalis (SEQ ID No. 146) | WP_058019250 |
| Flavobacterium columnare (SEQ ID No. 147) | WP_060381855 |
| Porphyromonas gingivalis (SEQ ID No. 148) | WP_061156470 |
| Porphyromonas gingivalis (SEQ ID No. 149) | WP_061156637 |
| Riemerella anatipestifer (SEQ ID No. 150) | WP_061710138 |
| Flavobacterium columnare (SEQ ID No. 151) | WP_063744070 |
| Riemerella anatipestifer (SEQ ID No. 152) | WP_064970887 |
| Sinomicrobium oceani (SEQ ID No. 153) | WP_072319476.1 |
| Reichenbachiella agariperforans (SEQ ID No. 154) | WP_073124441.1 |

[0253] In certain example embodiments, the RNA-targeting effector protein is a Cas13c effector protein as disclosed in U.S. Provisional Patent Application No. 62/525,165 filed Jun. 26, 2017, and PCT Application No. US2017/047193 filed Aug. 16, 2017. Example wildtype orthologue sequences of Cas13c are provided in Table 4b below In certain example embodiments, the CRISPR effector protein is a Cas13c protein from Table 4a or 4b.

TABLE 4a
Fusobacterium necrophorum subsp. funduliforme ATCC 51357 c0ntig00003 (SEQ ID No. 155)
Fusobacterium necrophorum DJ-2 contig0065, whole genome shotgun sequence (SEQ ID No. 156)
Fusobacterium necrophorum BFTR-1 contig0068 (SEQ ID No. 157)
Fusobacterium necrophorum subsp. funduliforme 1_1_36S cont1.14 (SEQ ID No. 158)
Fusobacterium perfoetens ATCC 29250 T364DRAFT_scaffold00009.9_C (SEQ ID No. 159)
Fusobacterium ulcerans ATCC 49185 cont2.38 (SEQ ID No. 160)
Anaerosalibacter sp. ND1 genome assembly Anaerosalibacter massiliensis ND1 (SEQ ID No. 161)

TABLE 4b
Name
EHO19081
WP_094899336
WP_040490876
WP_047396607
WP_035935671
WP_035906563
WP_042678931
WP_062627846
WP_005959231
WP_027128616
WP_062624740
WP_096402050

### Protein Split

[0254] CRISPR-Cas protein split sites that are suitable for inseration of nucleotide deaminase can be identified with the help of a crystal structure. One can use the crystal structure of an ortholog if a relatively high degree of homology exists between the ortholog and the intended CRISPR-Cas protein.

[0255] The split position may be located within a region or loop. Preferably, the split position occurs where an interruption of the amino acid sequence does not result in the partial or full destruction of a structural feature (e.g. alpha-helixes or β-sheets). Unstructured regions (regions that did not show up in the crystal structure because these regions are not structured enough to be “frozen” in a crystal) are often preferred options. The positions within the unstructured regions or outside loops may not need to be exactly the numbers provided above, but may vary by, for example 1, 2, 3, 4, 5, 6, 7, 8, 9, or even 10 amino acids either side of the position given above, depending on the size of the loop, so long as the split position still falls within an unstructured region of outside loop.

### CRISPR Development and Use

[0256] The present invention may be further illustrated and extended based on aspects of CRISPR-Cas development and use as set forth in the following articles and particularly as relates to delivery of a CRISPR protein complex and uses of an RNA guided endonuclease in cells and organisms:
[0257] Multiplex genome engineering using CRISPR-Cas systems. Cong, L., Ran, F. A., Cox, D., Lin, S., Barretto, R., Habib, N., Hsu, P. D., Wu, X., Jiang, W., Marraffini, L. A., & Zhang, F. Science February 15; 339(6121):819-23 (2013);
[0258] RNA-guided editing of bacterial genomes using CRISPR-Cas systems. Jiang W., Bikard D., Cox D., Zhang F, Marraffini L A. Nat Biotechnol Mar; 31(3):233-9 (2013);
[0259] One-Step Generation of Mice Carrying Mutations in Multiple Genes by CRISPR-Cas-Mediated Genome Engineering. Wang H., Yang H., Shivalila C S., Dawlaty M M., Cheng A W., Zhang F., Jaenisch R. Cell May 9; 153(4):910-8 (2013);
[0260] Optical control of mammalian endogenous transcription and epigenetic states. Konermann S, Brigham M D, Trevino A E, Hsu P D, Heidenreich M, Cong L, Platt R J, Scott D A, Church G M, Zhang F. Nature. August 22; 500(7463):472-6. doi: 10.1038/Nature12466. Epub 2013 Aug. 23 (2013);
[0261] Double Nicking by RNA-Guided CRISPR Cas9 for Enhanced Genome Editing Specificity. Ran, F A., Hsu, P D., Lin, C Y., Gootenberg, J S., Konermann, S., Trevino, A E., Scott, D A., Inoue, A., Matoba, S., Zhang, Y., & Zhang, F. Cell August 28. pii: S0092-8674(13)01015-5 (2013-A);
[0262] DNA targeting specificity of RNA-guided Cas9 nucleases. Hsu, P., Scott, D., Weinstein, J., Ran, F A., Konermann, S., Agarwala, V., Li, Y., Fine, E., Wu, X., Shalem, O., Cradick, T J., Marraffini, L A., Bao, G., & Zhang, F. Nat Biotechnol doi:10.1038/nbt.2647 (2013);
[0263] Genome engineering using the CRISPR-Cas9 system. Ran, F A., Hsu, P D., Wright, J., Agarwala, V., Scott, D A., Zhang, F. Nature Protocols November; 8(11):2281-308 (2013-B);
[0264] Genome-Scale CRISPR-Cas9 Knockout Screening in Human Cells. Shalem, O., Sanjana, N E., Hartenian, E., Shi, X., Scott, D A., Mikkelson, T., Heckl, D., Ebert, B L., Root, D E., Doench, J G., Zhang, F. Science December 12. (2013);
[0265] Crystal structure of cas9 in complex with guide RNA and target DNA. Nishimasu, H., Ran, F A., Hsu, P D., Konermann, S., Shehata, S I., Dohmae, N., Ishitani, R., Zhang, F., Nureki, O. Cell February 27, 156(5):935-49 (2014);
[0266] Genome-wide binding of the CRISPR endonuclease Cas9 in mammalian cells. Wu X., Scott D A., Kriz A J., Chiu A C., Hsu P D., Dadon D B., Cheng A W., Trevino A E., Konermann S., Chen S., Jaenisch R., Zhang F., Sharp P A. Nat Biotechnol. April 20. doi: 10.1038/nbt.2889 (2014);
[0267] CRISPR-Cas9 Knockin Mice for Genome Editing and Cancer Modeling. Platt R J, Chen S, Zhou Y, Yim M J, Swiech L, Kempton H R, Dahlman J E, Parnas 0, Eisenhaure T M, Jovanovic M, Graham D B, Jhunjhunwala S, Heidenreich M, Xavier R J, Langer R, Anderson D G, Hacohen N, Regev A, Feng G, Sharp P A, Zhang F. Cell 159(2): 440-455 DOI: 10.1016/j.cell.2014.09.014(2014);
[0268] Development and Applications of CRISPR-Cas9 for Genome Engineering, Hsu P D, Lander E S, Zhang F., Cell. June 5; 157(6):1262-78 (2014).
[0269] Genetic screens in human cells using the CRISPR-Cas9 system, Wang T, Wei J J, Sabatini D M, Lander E S., Science. January 3; 343(6166): 80-84. doi:10.1126/science.1246981(2014);
[0270] Rational design of highly active sgRNAs for CRISPR-Cas9-mediated gene inactivation, Doench J G, Hartenian E, Graham D B, Tothova Z, Hegde M, Smith I, Sullender M, Ebert B L, Xavier R J, Root D E., (published online 3 Sep. 2014) Nat Biotechnol. December; 32(12):1262-7 (2014);
[0271] In vivo interrogation of gene function in the mammalian brain using CRISPR-Cas9, Swiech L, Heidenreich M, Banerjee A, Habib N, Li Y, Trombetta J, Sur M, Zhang F., (published online 19 Oct. 2014) Nat Biotechnol. January; 33(1):102-6 (2015);
[0272] Genome-scale transcriptional activation by an engineered CRISPR-Cas9 complex, Konermann S, Brigham M D, Trevino A E, Joung J, Abudayyeh 00, Barcena C, Hsu P D, Habib N, Gootenberg J S, Nishimasu H, Nureki O, Zhang F., Nature. January 29; 517(7536):583-8 (2015).
[0273] A split-Cas9 architecture for inducible genome editing and transcription modulation, Zetsche B, Volz S E, Zhang F., (published online 2 Feb. 2015) Nat Biotechnol. February; 33(2):139-42 (2015);
[0274] Genome-wide CRISPR Screen in a Mouse Model of Tumor Growth and Metastasis, Chen S, Sanjana N E, Zheng K, Shalem O, Lee K, Shi X, Scott D A, Song J, Pan J Q, Weissleder R, Lee H, Zhang F, Sharp P A. Cell 160, 1246-1260, Mar. 12, 2015 (multiplex screen in mouse), and
[0275] In vivo genome editing using Staphylococcus aureus Cas9, Ran F A, Cong L, Yan W X, Scott D A, Gootenberg J S, Kriz A J, Zetsche B, Shalem O, Wu X, Makarova K S, Koonin E V, Sharp P A, Zhang F., (published online 1 Apr. 2015), Nature. April 9; 520(7546):186-91 (2015).
[0276] Shalem et al., “High-throughput functional genomics using CRISPR-Cas9,” Nature Reviews Genetics 16, 299-311 (May 2015).
[0277] Xu et al., “Sequence determinants of improved CRISPR sgRNA design,” Genome Research 25, 1147-1157 (August 2015).
[0278] Parnas et al., “A Genome-wide CRISPR Screen in Primary Immune Cells to Dissect Regulatory Networks,” Cell 162, 675-686 (Jul. 30, 2015).
[0279] Ramanan et al., CRISPR-Cas9 cleavage of viral DNA efficiently suppresses hepatitis B virus,” Scientific Reports 5:10833. doi: 10.1038/srep10833 (Jun. 2, 2015)
[0280] Nishimasu et al., Crystal Structure of Staphylococcus aureus Cas9,” Cell 162, 1113-1126 (Aug. 27, 2015)
[0281] BCL11A enhancer dissection by Cas9-mediated in situ saturating mutagenesis, Canver et al., Nature 527(7577):192-7 (Nov. 12, 2015) doi: 10.1038/nature15521. Epub 2015 Sep. 16.
[0282] Cas13 Is a Single RNA-Guided Endonuclease of a Class 2 CRISPR-Cas System, Zetsche et al., Cell 163, 759-71 (Sep. 25, 2015).
[0283] Discovery and Functional Characterization of Diverse Class 2 CRISPR-Cas Systems, Shmakov et al., Molecular Cell, 60(3), 385-397 doi: 10.1016/j.molcel.2015.10.008 Epub Oct. 22, 2015.
[0284] Rationally engineered Cas9 nucleases with improved specificity, Slaymaker et al., Science 2016 Jan. 1 351(6268): 84-88 doi: 10.1126/science.aad5227. Epub 2015 Dec. 1.
[0285] Gao et al, “Engineered Cas13 Enzymes with Altered PAM Specificities,” bioRxiv 091611; doi: http://dx.doi.org/10.1101/091611 (Dec. 4, 2016). each of which is incorporated herein by reference, may be considered in the practice of the instant invention, and discussed briefly below:
[0286] Cong et al. engineered type II CRISPR-Cas systems for use in eukaryotic cells based on both Streptococcus thermophilus Cas9 and also Streptococcus pyogenes Cas9 and demonstrated that Cas9 nucleases can be directed by short RNAs to induce precise cleavage of DNA in human and mouse cells. Their study further showed that Cas9 as converted into a nicking enzyme can be used to facilitate homology-directed repair in eukaryotic cells with minimal mutagenic activity. Additionally, their study demonstrated that multiple guide sequences can be encoded into a single CRISPR array to enable simultaneous editing of several at endogenous genomic loci sites within the mammalian genome, demonstrating easy programmability and wide applicability of the RNA-guided nuclease technology. This ability to use RNA to program sequence specific DNA cleavage in cells defined a new class of genome engineering tools. These studies further showed that other CRISPR loci are likely to be transplantable into mammalian cells and can also mediate mammalian genome cleavage. Importantly, it can be envisaged that several aspects of the CRISPR-Cas system can be further improved to increase its efficiency and versatility.
[0287] Jiang et al. used the clustered, regularly interspaced, short palindromic repeats (CRISPR)-associated Cas9 endonuclease complexed with dual-RNAs to introduce precise mutations in the genomes of Streptococcus pneumoniae and Escherichia coli. The approach relied on dual-RNA:Cas9-directed cleavage at the targeted genomic site to kill unmutated cells and circumvents the need for selectable markers or counter-selection systems. The study reported reprogramming dual-RNA:Cas9 specificity by changing the sequence of short CRISPR RNA (crRNA) to make single- and multinucleotide changes carried on editing templates. The study showed that simultaneous use of two crRNAs enabled multiplex mutagenesis. Furthermore, when the approach was used in combination with recombineering, in S. pneumoniae, nearly 100% of cells that were recovered using the described approach contained the desired mutation, and in E. coli, 65% that were recovered contained the mutation.
[0288] Wang et al. (2013) used the CRISPR-Cas system for the one-step generation of mice carrying mutations in multiple genes which were traditionally generated in multiple steps by sequential recombination in embryonic stem cells and/or time-consuming intercrossing of mice with a single mutation. The CRISPR-Cas system will greatly accelerate the in vivo study of functionally redundant genes and of epistatic gene interactions.
[0289] Konermann et al. (2013) addressed the need in the art for versatile and robust technologies that enable optical and chemical modulation of DNA-binding domains based CRISPR Cas9 enzyme and also Transcriptional Activator Like Effectors
[0290] Ran et al. (2013-A) described an approach that combined a Cas9 nickase mutant with paired guide RNAs to introduce targeted double-strand breaks. This addresses the issue of the Cas9 nuclease from the microbial CRISPR-Cas system being targeted to specific genomic loci by a guide sequence, which can tolerate certain mismatches to the DNA target and thereby promote undesired off-target mutagenesis. Because individual nicks in the genome are repaired with high fidelity, simultaneous nicking via appropriately offset guide RNAs is required for double-stranded breaks and
[0291] extends the number of specifically recognized bases for target cleavage. The authors demonstrated that using paired nicking can reduce off-target activity by 50- to 1,500-fold in cell lines and to facilitate gene knockout in mouse zygotes without sacrificing on-target cleavage efficiency. This versatile strategy enables a wide variety of genome editing applications that require high specificity.
[0292] Hsu et al. (2013) characterized SpCas9 targeting specificity in human cells to inform the selection of target sites and avoid off-target effects. The study evaluated >700 guide RNA variants and SpCas9-induced indel mutation levels at >100 predicted genomic off-target loci in 293T and 293FT cells. The authors that SpCas9 tolerates mismatches between guide RNA and target DNA at different positions in a sequence-dependent manner, sensitive to the number, position and distribution of mismatches. The authors further showed that SpCas9-mediated cleavage is unaffected by DNA methylation and that the dosage of SpCas9 and guide RNA can be titrated to minimize off-target modification. Additionally, to facilitate mammalian genome engineering applications, the authors reported providing a web-based software tool to guide the selection and validation of target sequences as well as off-target analyses.
[0293] Ran et al. (2013-B) described a set of tools for Cas9-mediated genome editing via non-homologous end joining (NHEJ) or homology-directed repair (HDR) in mammalian cells, as well as generation of modified cell lines for downstream functional studies. To minimize off-target cleavage, the authors further described a double-nicking strategy using the Cas9 nickase mutant with paired guide RNAs. The protocol provided by the authors experimentally derived guidelines for the selection of target sites, evaluation of cleavage efficiency and analysis of off-target activity. The studies showed that beginning with target design, gene modifications can be achieved within as little as 1-2 weeks, and modified clonal cell lines can be derived within 2-3 weeks.
[0294] Shalem et al. described a new way to interrogate gene function on a genome-wide scale. Their studies showed that delivery of a genome-scale CRISPR-Cas9 knockout (GeCKO) library targeted 18,080 genes with 64,751 unique guide sequences enabled both negative and positive selection screening in human cells. First, the authors showed use of the GeCKO library to identify genes essential for cell viability in cancer and pluripotent stem cells. Next, in a melanoma model, the authors screened for genes whose loss is involved in resistance to vemurafenib, a therapeutic that inhibits mutant protein kinase BRAF. Their studies showed that the highest-ranking candidates included previously validated genes NF1 and MED12 as well as novel hits NF2, CUL3, TADA2B, and TADA1. The authors observed a high level of consistency between independent guide RNAs targeting the same gene and a high rate of hit confirmation, and thus demonstrated the promise of genome-scale screening with Cas9.
[0295] Nishimasu et al. reported the crystal structure of Streptococcus pyogenes Cas9 in complex with sgRNA and its target DNA at 2.5 A° resolution. The structure revealed a bilobed architecture composed of target recognition and nuclease lobes, accommodating the sgRNA:DNAn RNA duplex in a positively charged groove at their interface. Whereas the recognition lobe is essential for binding sgRNA and DNA, the nuclease lobe contains the HNH and RuvC nuclease domains, which are properly positioned for cleavage of the complementary and non-complementary strands of the target DNA, respectively. The nuclease lobe also contains a carboxyl-terminal domain responsible for the interaction with the protospacer adjacent motif (PAM). This high-resolution structure and accompanying functional analyses have revealed the molecular mechanism of RNA-guided DNA targeting by Cas9, thus paving the way for the rational design of new, versatile genome-editing technologies.
[0296] Wu et al. mapped genome-wide binding sites of a catalytically inactive Cas9 (dCas9) from Streptococcus pyogenes loaded with single guide RNAs (sgRNAs) in mouse embryonic stem cells (mESCs). The authors showed that each of the four sgRNAs tested targets dCas9 to between tens and thousands of genomic sites, frequently characterized by a 5-nucleotide seed region in the sgRNA and an NGG protospacer adjacent motif (PAM). Chromatin inaccessibility decreases dCas9 binding to other sites with matching seed sequences; thus 70% of off-target sites are associated with genes. The authors showed that targeted sequencing of 295 dCas9 binding sites in mESCs transfected with catalytically active Cas9 identified only one site mutated above background levels. The authors proposed a two-state model for Cas9 binding and cleavage, in which a seed match triggers binding but extensive pairing with target DNA is required for cleavage.
[0297] Platt et al. established a Cre-dependent Cas9 knockin mouse. The authors demonstrated in vivo as well as ex vivo genome editing using adeno-associated virus (AAV)-, lentivirus-, or particle-mediated delivery of guide RNA in neurons, immune cells, and endothelial cells.
[0298] Hsu et al. (2014) is a review article that discusses generally CRISPR-Cas9 history from yogurt to genome editing, including genetic screening of cells.
[0299] Wang et al. (2014) relates to a pooled, loss-of-function genetic screening approach suitable for both positive and negative selection that uses a genome-scale lentiviral single guide RNA (sgRNA) library.
[0300] Doench et al. created a pool of sgRNAs, tiling across all possible target sites of a panel of six endogenous mouse and three endogenous human genes and quantitatively assessed their ability to produce null alleles of their target gene by antibody staining and flow cytometry. The authors showed that optimization of the PAM improved activity and also provided an on-line tool for designing sgRNAs.
[0301] Swiech et al. demonstrate that AAV-mediated SpCas9 genome editing can enable reverse genetic studies of gene function in the brain.
[0302] Konermann et al. (2015) discusses the ability to attach multiple effector domains, e.g., transcriptional activator, functional and epigenomic regulators at appropriate positions on the guide such as stem or tetraloop with and without linkers.
[0303] Zetsche et al. demonstrates that the Cas9 enzyme can be split into two and hence the assembly of Cas9 for activation can be controlled.
[0304] Chen et al. relates to multiplex screening by demonstrating that a genome-wide in vivo CRISPR-Cas9 screen in mice reveals genes regulating lung metastasis.
[0305] Ran et al. (2015) relates to SaCas9 and its ability to edit genomes and demonstrates that one cannot extrapolate from biochemical assays.
[0306] Shalem et al. (2015) described ways in which catalytically inactive Cas9 (dCas9) fusions are used to synthetically repress (CRISPRi) or activate (CRISPRa) expression, showing. advances using Cas9 for genome-scale screens, including arrayed and pooled screens, knockout approaches that inactivate genomic loci and strategies that modulate transcriptional activity.
[0307] Xu et al. (2015) assessed the DNA sequence features that contribute to single guide RNA (sgRNA) efficiency in CRISPR-based screens. The authors explored efficiency of CRISPR-Cas9 knockout and nucleotide preference at the cleavage site. The authors also found that the sequence preference for CRISPRi/a is substantially different from that for CRISPR-Cas9 knockout.
[0308] Parnas et al. (2015) introduced genome-wide pooled CRISPR-Cas9 libraries into dendritic cells (DCs) to identify genes that control the induction of tumor necrosis factor (Tnf) by bacterial lipopolysaccharide (LPS). Known regulators of Tlr4 signaling and previously unknown candidates were identified and classified into three functional modules with distinct effects on the canonical responses to LPS.
[0309] Ramanan et al (2015) demonstrated cleavage of viral episomal DNA (cccDNA) in infected cells. The HBV genome exists in the nuclei of infected hepatocytes as a 3.2 kb double-stranded episomal DNA species called covalently closed circular DNA (cccDNA), which is a key component in the HBV life cycle whose replication is not inhibited by current therapies. The authors showed that sgRNAs specifically targeting highly conserved regions of HBV robustly suppresses viral replication and depleted cccDNA.
[0310] Nishimasu et al. (2015) reported the crystal structures of SaCas9 in complex with a single guide RNA (sgRNA) and its double-stranded DNA targets, containing the 5′-TTGAAT-3′ PAM and the 5′-TTGGGT-3′ PAM. A structural comparison of SaCas9 with SpCas9 highlighted both structural conservation and divergence, explaining their distinct PAM specificities and orthologous sgRNA recognition.
[0311] Canver et al. (2015) demonstrated a CRISPR-Cas9-based functional investigation of non-coding genomic elements. The authors we developed pooled CRISPR-Cas9 guide RNA libraries to perform in situ saturating mutagenesis of the human and mouse BCL11A enhancers which revealed critical features of the enhancers.
[0312] Zetsche et al. (2015) reported characterization of Cas13, a class 2 CRISPR nuclease from Francisella novicida U112 having features distinct from Cas9. Cas13 is a single RNA-guided endonuclease lacking tracrRNA, utilizes a T-rich protospacer-adjacent motif, and cleaves DNA via a staggered DNA double-stranded break.
[0313] Shmakov et al. (2015) reported three distinct Class 2 CRISPR-Cas systems. Two system CRISPR enzymes (C2c1 and C2c3) contain RuvC-like endonuclease domains distantly related to Cas13. Unlike Cas13, C2c1 depends on both crRNA and tracrRNA for DNA cleavage. The third enzyme (C2c2) contains two predicted HEPN RNase domains and is tracrRNA independent.
[0314] Slaymaker et al (2016) reported the use of structure-guided protein engineering to improve the specificity of Streptococcus pyogenes Cas9 (SpCas9). The authors developed “enhanced specificity” SpCas9 (eSpCas9) variants which maintained robust on-target cleavage with reduced off-target effects.

[0315] The methods and tools provided herein are exemplified for Cas13, a type II nuclease that does not make use of tracrRNA. Orthologs of Cas13 have been identified in different bacterial species as described herein. Further type II nucleases with similar properties can be identified using methods described in the art (Shmakov et al. 2015, 60:385-397; Abudayeh et al. 2016, Science, 5; 353(6299)). In particular embodiments, such methods for identifying novel CRISPR effector proteins may comprise the steps of selecting sequences from the database encoding a seed which identifies the presence of a CRISPR Cas locus, identifying loci located within 10 kb of the seed comprising Open Reading Frames (ORFs) in the selected sequences, selecting therefrom loci comprising ORFs of which only a single ORF encodes a novel CRISPR effector having greater than 700 amino acids and no more than 90% homology to a known CRISPR effector. In particular embodiments, the seed is a protein that is common to the CRISPR-Cas system, such as Cas1. In further embodiments, the CRISPR array is used as a seed to identify new effector proteins.

[0316] The effectiveness of the present invention has been demonstrated. Preassembled recombinant CRISPR-Cas13 complexes comprising Cas13 and crRNA may be transfected, for example by electroporation, resulting in high mutation rates and absence of detectable off-target mutations. Hur, J. K. et al, Targeted mutagenesis in mice by electroporation of Cas13 ribonucleoproteins, Nat Biotechnol. 2016 Jun. 6. doi: 10.1038/nbt.3596. Genome-wide analyses shows that Cas13 is highly specific. By one measure, in vitro cleavage sites determined for Cas13 in human HEK293T cells were significantly fewer that for SpCas9. Kim, D. et al., Genome-wide analysis reveals specificities of Cas13 endonucleases in human cells, Nat Biotechnol. 2016 Jun. 6. doi: 10.1038/nbt.3609. An efficient multiplexed system employing Cas13 has been demonstrated in Drosophila employing gRNAs processed from an array containing inventing tRNAs. Port, F. et al, Expansion of the CRISPR toolbox in an animal with tRNA-flanked Cas9 and Cas13 gRNAs. doi: http://dx.doi.org/10.1101/046417.

[0317] Also, “Dimeric CRISPR RNA-guided FokI nucleases for highly specific genome editing”, Shengdar Q. Tsai, Nicolas Wyvekens, Cyd Khayter, Jennifer A. Foden, Vishal Thapar, Deepak Reyon, Mathew J. Goodwin, Martin J. Aryee, J. Keith Joung Nature Biotechnology 32(6): 569-77 (2014), relates to dimeric RNA-guided FokI Nucleases that recognize extended sequences and can edit endogenous genes with high efficiencies in human cells.

[0318] With respect to general information on CRISPR/Cas Systems, components thereof, and delivery of such components, including methods, materials, delivery vehicles, vectors, particles, and making and using thereof, including as to amounts and formulations, as well as CRISPR-Cas-expressing eukaryotic cells, CRISPR-Cas expressing eukaryotes, such as a mouse, reference is made to: U.S. Pat. Nos. 8,999,641, 8,993,233, 8,697,359, 8,771,945, 8,795,965, 8,865,406, 8,871,445, 8,889,356, 8,889,418, 8,895,308, 8,906,616, 8,932,814, and 8,945,839; US Patent Publications US 2014-0310830 (U.S. application Ser. No. 14/105,031), US 2014-0287938 A1 (U.S. application Ser. No. 14/213,991), US 2014-0273234 A1 (U.S. application Ser. No. 14/293,674), US2014-0273232 A1 (U.S. application Ser. No. 14/290,575), US 2014-0273231 (U.S. application Ser. No. 14/259,420), US 2014-0256046 A1 (U.S. application Ser. No. 14/226,274), US 2014-0248702 A1 (U.S. application Ser. No. 14/258,458), US 2014-0242700 A1 (U.S. application Ser. No. 14/222,930), US 2014-0242699 A1 (U.S. application Ser. No. 14/183,512), US 2014-0242664 A1 (U.S. application Ser. No. 14/104,990), US 2014-0234972 A1 (U.S. application Ser. No. 14/183,471), US 2014-0227787 A1 (U.S. application Ser. No. 14/256,912), US 2014-0189896 A1 (U.S. application Ser. No. 14/105,035), US 2014-0186958 (U.S. application Ser. No. 14/105,017), US 2014-0186919 A1 (U.S. application Ser. No. 14/104,977), US 2014-0186843 A1 (U.S. application Ser. No. 14/104,900), US 2014-0179770 A1 (U.S. application Ser. No. 14/104,837) and US 2014-0179006 A1 (U.S. application Ser. No. 14/183,486), US 2014-0170753 (U.S. application Ser. No. 14/183,429); US 2015-0184139 (U.S. application Ser. No. 14/324,960); Ser. No. 14/054,414 European Patent Applications EP 2 771 468 (EP13818570.7), EP 2 764 103 (EP13824232.6), and EP 2 784 162 (EP14170383.5); and PCT Patent Publications WO2014/093661 (PCT/US2013/074743), WO2014/093694 (PCT/US2013/074790), WO2014/093595 (PCT/US2013/074611), WO2014/093718 (PCT/US2013/074825), WO2014/093709 (PCT/US2013/074812), WO2014/093622 (PCT/US2013/074667), WO2014/093635 (PCT/US2013/074691), WO2014/093655 (PCT/US2013/074736), WO2014/093712 (PCT/US2013/074819), WO2014/093701 (PCT/US2013/074800), WO2014/018423 (PCT/US2013/051418), WO2014/204723 (PCT/US2014/041790), WO2014/204724 (PCT/US2014/041800), WO2014/204725 (PCT/US2014/041803), WO2014/204726 (PCT/US2014/041804), WO2014/204727 (PCT/US2014/041806), WO2014/204728 (PCT/US2014/041808), WO2014/204729 (PCT/US2014/041809), WO2015/089351 (PCT/US2014/069897), WO2015/089354 (PCT/US2014/069902), WO2015/089364 (PCT/US2014/069925), WO2015/089427 (PCT/US2014/070068), WO2015/089462 (PCT/US2014/070127), WO2015/089419 (PCT/US2014/070057), WO2015/089465 (PCT/US2014/070135), WO2015/089486 (PCT/US2014/070175), WO2015/058052 (PCT/US2014/061077), WO2015/070083 (PCT/US2014/064663), WO2015/089354 (PCT/US2014/069902), WO2015/089351 (PCT/US2014/069897), WO2015/089364 (PCT/US2014/069925), WO2015/089427 (PCT/US2014/070068), WO2015/089473 (PCT/US2014/070152), WO2015/089486 (PCT/US2014/070175), WO2016/049258 (PCT/US2015/051830), WO2016/094867 (PCT/US2015/065385), WO2016/094872 (PCT/US2015/065393), WO2016/094874 (PCT/US2015/065396), WO2016/106244 (PCT/US2015/067177).

[0319] Mention is also made of U.S. application 62/180,709, 17-June-15, PROTECTED GUIDE RNAS (PGRNAS); U.S. application 62/091,455, filed, 12-December-14, PROTECTED GUIDE RNAS (PGRNAS); U.S. application 62/096,708, 24-December-14, PROTECTED GUIDE RNAS (PGRNAS); U.S. applications 62/091,462, 12-December-14, 62/096,324, 23-December-14, 62/180,681, 17 Jun. 2015, and 62/237,496, 5 Oct. 2015, DEAD GUIDES FOR CRISPR TRANSCRIPTION FACTORS; U.S. application 62/091,456, 12-December-14 and 62/180,692, 17-Jun.-2015, ESCORTED AND FUNCTIONALIZED GUIDES FOR CRISPR-CAS SYSTEMS; U.S. application 62/091,461, 12-December-14, DELIVERY, USE AND THERAPEUTIC APPLICATIONS OF THE CRISPR-CAS SYSTEMS AND COMPOSITIONS FOR GENOME EDITING AS TO HEMATOPOETIC STEM CELLS (HSCs); U.S. application 62/094,903, 19-December-14, UNBIASED IDENTIFICATION OF DOUBLE-STRAND BREAKS AND GENOMIC REARRANGEMENT BY GENOME-WISE INSERT CAPTURE SEQUENCING; U.S. application 62/096,761, 24-December-14, ENGINEERING OF SYSTEMS, METHODS AND OPTIMIZED ENZYME AND GUIDE SCAFFOLDS FOR SEQUENCE MANIPULATION; U.S. application 62/098,059, 30-December-14, 62/181,641, 18 Jun. 2015, and 62/181,667, 18 Jun. 2015, RNA-TARGETING SYSTEM; U.S. application 62/096,656, 24-December-14 and 62/181,151, 17 Jun. 2015, CRISPR HAVING OR ASSOCIATED WITH DESTABILIZATION DOMAINS; U.S. application 62/096,697, 24-December-14, CRISPR HAVING OR ASSOCIATED WITH AAV; U.S. application 62/098,158, 30-December-14, ENGINEERED CRISPR COMPLEX INSERTIONAL TARGETING SYSTEMS; U.S. application 62/151,052, 22-April-15, CELLULAR TARGETING FOR EXTRACELLULAR EXOSOMAL REPORTING; U.S. application 62/054,490, 24-September-14, DELIVERY, USE AND THERAPEUTIC APPLICATIONS OF THE CRISPR-CAS SYSTEMS AND COMPOSITIONS FOR TARGETING DISORDERS AND DISEASES USING PARTICLE DELIVERY COMPONENTS; U.S. application 61/939,154, 12-F

[0320] EB-14, SYSTEMS, METHODS AND COMPOSITIONS FOR SEQUENCE MANIPULATION WITH OPTIMIZED FUNCTIONAL CRISPR-CAS SYSTEMS; U.S. application 62/055,484, 25-September-14, SYSTEMS, METHODS AND COMPOSITIONS FOR SEQUENCE MANIPULATION WITH OPTIMIZED FUNCTIONAL CRISPR-CAS SYSTEMS; U.S. application 62/087,537, 4-December-14, SYSTEMS, METHODS AND COMPOSITIONS FOR SEQUENCE MANIPULATION WITH OPTIMIZED FUNCTIONAL CRISPR-CAS SYSTEMS; U.S. application 62/054,651, 24-September-14, DELIVERY, USE AND THERAPEUTIC APPLICATIONS OF THE CRISPR-CAS SYSTEMS AND COMPOSITIONS FOR MODELING COMPETITION OF MULTIPLE CANCER MUTATIONS IN VIVO; U.S. application 62/067,886, 23-October-14, DELIVERY, USE AND THERAPEUTIC APPLICATIONS OF THE CRISPR-CAS SYSTEMS AND COMPOSITIONS FOR MODELING COMPETITION OF MULTIPLE CANCER MUTATIONS IN VIVO; U.S. applications 62/054,675, 24-September-14 and 62/181,002, 17 Jun. 2015, DELIVERY, USE AND THERAPEUTIC APPLICATIONS OF THE CRISPR-CAS SYSTEMS AND COMPOSITIONS IN NEURONAL CELLS/TISSUES; U.S. application 62/054,528, 24-September-14, DELIVERY, USE AND THERAPEUTIC APPLICATIONS OF THE CRISPR-CAS SYSTEMS AND COMPOSITIONS IN IMMUNE DISEASES OR DISORDERS; U.S. application 62/055,454, 25-September-14, DELIVERY, USE AND THERAPEUTIC APPLICATIONS OF THE CRISPR-CAS SYSTEMS AND COMPOSITIONS FOR TARGETING DISORDERS AND DISEASES USING CELL PENETRATION PEPTIDES (CPP); U.S. application 62/055,460, 25-September-14, MULTIFUNCTIONAL-CRISPR COMPLEXES AND/OR OPTIMIZED ENZYME LINKED FUNCTIONAL-CRISPR COMPLEXES; U.S. application 62/087,475, 4-December-14 and 62/181,690, 18 Jun. 2015, FUNCTIONAL SCREENING WITH OPTIMIZED FUNCTIONAL CRISPR-CAS SYSTEMS; U.S. application 62/055,487, 25-September-14, FUNCTIONAL SCREENING WITH OPTIMIZED FUNCTIONAL CRISPR-CAS SYSTEMS; U.S. application 62/087,546, 4-December-14 and 62/181,687, 18 Jun. 2015, MULTIFUNCTIONAL CRISPR COMPLEXES AND/OR OPTIMIZED ENZYME LINKED FUNCTIONAL-CRISPR COMPLEXES; and U.S. application 62/098,285, 30-December-14, CRISPR MEDIATED IN VIVO MODELING AND GENETIC SCREENING OF TUMOR GROWTH AND METASTASIS.

[0321] Mention is made of U.S. applications 62/181,659, 18 Jun. 2015 and 62/207,318, 19-Aug.-2015, ENGINEERING AND OPTIMIZATION OF SYSTEMS, METHODS, ENZYME AND GUIDE SCAFFOLDS OF CAS9 ORTHOLOGS AND VARIANTS FOR SEQUENCE MANIPULATION. Mention is made of U.S. applications 62/181,663, 18 Jun. 2015 and 62/245,264, 22 Oct. 2015, NOVEL CRISPR ENZYMES AND SYSTEMS, U.S. applications 62/181,675, 18 Jun. 2015, 62/285,349, 22 Oct. 2015, 62/296,522, 17 Feb. 2016, and 62/320,231, 8 Apr. 2016, NOVEL CRISPR ENZYMES AND SYSTEMS, U.S. application 62/232,067, 24 Sep. 2015, U.S. application Ser. No. 14/975,085, 18 Dec. 2015, European application No. 16150428.7, U.S. application 62/205,733, 16 Aug. 2015, U.S. application 62/201,542, 5-Aug.-2015, U.S. application 62/193,507, 16 Jul. 2015, and U.S. application 62/181,739, 18 Jun. 2015, each entitled NOVEL CRISPR ENZYMES AND SYSTEMS and of U.S. application 62/245,270, 22 Oct. 2015, NOVEL CRISPR ENZYMES AND SYSTEMS. Mention is also made of U.S. application 61/939,256, 12 Feb. 2014, and WO 2015/089473 (PCT/US2014/070152), 12 Dec. 2014, each entitled ENGINEERING OF SYSTEMS, METHODS AND OPTIMIZED GUIDE COMPOSITIONS WITH NEW ARCHITECTURES FOR SEQUENCE MANIPULATION. Mention is also made of PCT/US2015/045504, 15 Aug. 2015, U.S. application 62/180,699, 17 Jun. 2015, and U.S. application 62/038,358, 17 Aug. 2014, each entitled GENOME EDITING USING CAS9 NICKASES.

[0322] Each of these patents, patent publications, and applications, and all documents cited therein or during their prosecution (“appln cited documents”) and all documents cited or referenced in the appln cited documents, together with any instructions, descriptions, product specifications, and product sheets for any products mentioned therein or in any document therein and incorporated by reference herein, are hereby incorporated herein by reference, and may be employed in the practice of the invention. All documents (e.g., these patents, patent publications and applications and the appln cited documents) are incorporated herein by reference to the same extent as if each individual document was specifically and individually indicated to be incorporated by reference.

### Guide Molecule

[0323] The system may comprise a guide molecule. The guide molecule may comprise a guide sequence. In certain cases, the guide sequence may be linked to a direct repeat sequence. In some cases, the system may comprise a nucleotide sequence encoding the guide molecule. The guide molecule may form a complex with the dead Cas13 protein and directs the complex to bind the target RNA sequence at one or more codons encoding an amino acid that is post-translationally modified. The guide sequence may be capable of hybridizing with a target RNA sequence comprising an Adenine or Cytidine encoding said amino acid to form an RNA duplex, wherein said guide sequence comprises a non-pairing nucleotide at a position corresponding to said Adenine or Cytidine resulting in a mismatch in the RNA duplex formed.

The guide sequence may comprise one or more mismatch corresponding to different adenosine sites in the target sequence. In certain cases, guide sequence may comprise multiple mismatches corresponding to different adenosine sites in the target sequence. In cases where two guide molecules are used, the guide sequence of each of the guide molecules may comprise a mismatch corresponding to a different adenosine sites in the target sequence.

[0324] The guide molecule or guide RNA of a Class 2 type V CRISPR-Cas protein comprises a tracr-mate sequence (encompassing a “direct repeat” in the context of an endogenous CRISPR system) and a guide sequence (also referred to as a “spacer” in the context of an endogenous CRISPR system). Indeed, in contrast to the type II CRISPR-Cas proteins, the Cas13 protein does not rely on the presence of a tracr sequence. In some embodiments, the CRISPR-Cas system or complex as described herein does not comprise and/or does not rely on the presence of a tracr sequence (e.g. if the Cas protein is Cas13). In certain embodiments, the guide molecule may comprise, consist essentially of, or consist of a direct repeat sequence fused or linked to a guide sequence or spacer sequence.

[0325] In general, a CRISPR system is characterized by elements that promote the formation of a CRISPR complex at the site of a target sequence. In the context of formation of a CRISPR complex, “target sequence” refers to a sequence to which a guide sequence is designed to have complementarity, where hybridization between a target DNA sequence and a guide sequence promotes the formation of a CRISPR complex.

[0326] The terms “guide molecule” and “guide RNA” are used interchangeably herein to refer to RNA-based molecules that are capable of forming a complex with a CRISPR-Cas protein and comprises a guide sequence having sufficient complementarity with a target nucleic acid sequence to hybridize with the target nucleic acid sequence and direct sequence-specific binding of the complex to the target nucleic acid sequence. The guide molecule or guide RNA specifically encompasses RNA-based molecules having one or more chemically modifications (e.g., by chemical linking two ribonucleotides or by replacement of one or more ribonucleotides with one or more deoxyribonucleotides), as described herein.

[0327] As used herein, the term “guide sequence” in the context of a CRISPR-Cas system, comprises any polynucleotide sequence having sufficient complementarity with a target nucleic acid sequence to hybridize with the target nucleic acid sequence and direct sequence-specific binding of a nucleic acid-targeting complex to the target nucleic acid sequence. In the context of the present invention the target nucleic acid sequence or target sequence is the sequence comprising the target adenosine to be deaminated also referred to herein as the “target adenosine”. In some embodiments, except for the intended dA-C mismatch, the degree of complementarity, when optimally aligned using a suitable alignment algorithm, is about or more than about 50%, 60%, 75%, 80%, 85%, 90%, 95%, 97.5%, 99%, or more. Optimal alignment may be determined with the use of any suitable algorithm for aligning sequences, non-limiting example of which include the Smith-Waterman algorithm, the Needleman-Wunsch algorithm, algorithms based on the Burrows-Wheeler Transform (e.g., the Burrows Wheeler Aligner), ClustalW, Clustal X, BLAT, Novoalign (Novocraft Technologies; available at www.novocraft.com), ELAND (Illumina, San Diego, Calif.), SOAP (available at soap.genomics.org.cn), and Maq (available at maq.sourceforge.net). The ability of a guide sequence (within a nucleic acid-targeting guide RNA) to direct sequence-specific binding of a nucleic acid-targeting complex to a target nucleic acid sequence may be assessed by any suitable assay. For example, the components of a nucleic acid-targeting CRISPR system sufficient to form a nucleic acid-targeting complex, including the guide sequence to be tested, may be provided to a host cell having the corresponding target nucleic acid sequence, such as by transfection with vectors encoding the components of the nucleic acid-targeting complex, followed by an assessment of preferential targeting (e.g., cleavage) within the target nucleic acid sequence, such as by Surveyor assay as described herein. Similarly, cleavage of a target nucleic acid sequence (or a sequence in the vicinity thereof) may be evaluated in a test tube by providing the target nucleic acid sequence, components of a nucleic acid-targeting complex, including the guide sequence to be tested and a control guide sequence different from the test guide sequence, and comparing binding or rate of cleavage at or in the vicinity of the target sequence between the test and control guide sequence reactions. Other assays are possible, and will occur to those skilled in the art. A guide sequence, and hence a nucleic acid-targeting guide RNA may be selected to target any target nucleic acid sequence.

[0328] In some embodiments, the guide molecule comprises a guide sequence that is designed to have at least one mismatch with the target sequence, such that an RNA duplex formed between the guide sequence and the target sequence comprises a non-pairing C in the guide sequence opposite to the target A for deamination on the target sequence. In some embodiments, aside from this A-C mismatch, the degree of complementarity, when optimally aligned using a suitable alignment algorithm, is about or more than about 50%, 60%, 75%, 80%, 85%, 90%, 95%, 97.5%, 99%, or more. In some cases, the distance between the non-pairing C and the 5′ end of the guide sequence is from about 10 to about 50, e.g., from about 10 to about 20, from about 15 to about 25, from about 20 to about 30, from about 25 to about 35, from about 30 to about 40, from about 35 to about 45, or from about 40 to about 50 nucleotides (nt) in length. In certain example, In some cases, the distance between the non-pairing C and the 3′ end of the guide sequence is from about 10 to about 50, e.g., from about 10 to about 20, from about 15 to about 25, from about 20 to about 30, from about 25 to about 35, from about 30 to about 40, from about 35 to about 45, or from about 40 to about 50 nucleotides (nt) in length. In one example, the distance between the non-pairing C and the 5′ end of said guide sequence is from about 20 to about 30 nucleotides.

[0329] In certain embodiments, the guide sequence or spacer length of the guide molecules is from 15 to 50 nt. In certain embodiments, the spacer length of the guide RNA is at least 15 nucleotides. In certain embodiments, the spacer length is from 15 to 17 nt, e.g., 15, 16, or 17 nt, from 17 to 20 nt, e.g., 17, 18, 19, or 20 nt, from 20 to 24 nt, e.g., 20, 21, 22, 23, or 24 nt, from 23 to 25 nt, e.g., 23, 24, or 25 nt, from 24 to 27 nt, e.g., 24, 25, 26, or 27 nt, from 27-30 nt, e.g., 27, 28, 29, or 30 nt, from 30-35 nt, e.g., 30, 31, 32, 33, 34, or 35 nt, or 35 nt or longer. In certain example embodiment, the guide sequence is 15, 16, 17, 18, 19, 20, 21, 22, 23, 24, 25, 26, 27, 28, 29, 30, 31, 32, 33, 34, 35, 36, 37, 38, 3940, 41, 42, 43, 44, 45, 46, 4748, 49, 50, 51, 52, 53, 54, 55, 56, 57, 58, 59, 60, 61, 62, 63, 64, 65, 66, 67, 68, 69, 70, 71, 72, 73, 74, 75, 76, 77, 78, 79, 80, 81, 82, 83, 84, 85, 86, 87, 88, 89, 90, 91, 92, 93, 94, 95, 96, 97, 98, 99, or 100 nt.

[0330] In some embodiments, the guide sequence has a length from about 10 to about 100, e.g., from about 20 to about 60, from about 20 to about 55, from about 20 to about 53, from about 25 to about 53, from about 29 to about 53, from about 20 to about 30, from about 25 to about 35, from about 30 to about 40, from about 35 to about 45, from about 40 to about 50, from about 45 to about 55, from about 50 to about 60, from about 55 to about 65, from about 60 to about 70, from about 70 to about 80, from about 80 to about 90, or from about 90 to about 100 nucleotides (nt) long that is capable of forming an RNA duplex with a target sequence. In certain example, the guide sequence has a length from about 20 to about 53 nt capable of forming said RNA duplex with said target sequence. In certain example, the guide sequence has a length from about 25 to about 53 nt capable of forming said RNA duplex with said target sequence. In certain example, the guide sequence has a length from about 29 to about 53 nt capable of forming said RNA duplex with said target sequence. In certain example, the guide sequence has a length from about 40 to about 50 nt capable of forming said RNA duplex with said target sequence. In some examples, the guide sequence comprises a non-pairing Cytosine at a position corresponding to said Adenine resulting in an A-C mismatch in the RNA duplex formed.

[0331] In some embodiments, the guide sequence is an RNA sequence of between 10 to 50 nt in length, but more particularly of about 20-30 nt advantageously about 20 nt, 23-25 nt or 24 nt. The guide sequence is selected so as to ensure that it hybridizes to the target sequence comprising the adenosine to be deaminated. This is described more in detail below. Selection can encompass further steps which increase efficacy and specificity of deamination.

[0332] In some embodiments, the guide sequence is about 20 nt to about 30 nt long and hybridizes to the target DNA strand to form an almost perfectly matched duplex, except for having a dA-C mismatch at the target adenosine site. Particularly, in some embodiments, the dA-C mismatch is located close to the center of the target sequence (and thus the center of the duplex upon hybridization of the guide sequence to the target sequence), thereby restricting the nucleotide deaminase to a narrow editing window (e.g., about 4 bp wide). In some embodiments, the target sequence may comprise more than one target adenosine to be deaminated. In further embodiments the target sequence may further comprise one or more dA-C mismatch 3′ to the target adenosine site. In some embodiments, to avoid off-target editing at an unintended Adenine site in the target sequence, the guide sequence can be designed to comprise a non-pairing Guanine at a position corresponding to said unintended Adenine to introduce a dA-G mismatch, which is catalytically unfavorable for certain nucleotide deaminases such as ADAR1 and ADAR2. See Wong et al., RNA 7:846-858 (2001), which is incorporated herein by reference in its entirety.

[0333] In some embodiments, a Cas13 guide sequence having a canonical length (e.g., about 24 nt for AsCas13) is used to form an RNA duplex with the target DNA. In some embodiments, a Cas13 guide molecule longer than the canonical length (e.g., >24 nt for AsCas13) is used to form an RNA duplex with the target DNA including outside of the Cas13-guide RNA-target DNA complex. This can be of interest where deamination of more than one adenine within a given stretch of nucleotides is of interest. In alternative embodiments, it is of interest to maintain the limitation of the canonical guide sequence length. In some embodiments, the guide sequence is designed to introduce a dA-C mismatch outside of the canonical length of Cas13 guide, which may decrease steric hindrance by Cas13 and increase the frequency of contact between the adenosine deaminase and the dA-C mismatch.

[0334] In some embodiments, the sequence of the guide molecule (direct repeat and/or spacer) is selected to reduce the degree secondary structure within the guide molecule. In some embodiments, about or less than about 75%, 50%, 40%, 30%, 25%, 20%, 15%, 10%, 5%, 1%, or fewer of the nucleotides of the nucleic acid-targeting guide RNA participate in self-complementary base pairing when optimally folded. Optimal folding may be determined by any suitable polynucleotide folding algorithm. Some programs are based on calculating the minimal Gibbs free energy. An example of one such algorithm is mFold, as described by Zuker and Stiegler (Nucleic Acids Res. 9 (1981), 133-148). Another example folding algorithm is the online webserver RNAfold, developed at Institute for Theoretical Chemistry at the University of Vienna, using the centroid structure prediction algorithm (see e.g., A. R. Gruber et al., 2008, Cell 106(1): 23-24; and PA Carr and GM Church, 2009, Nature Biotechnology 27(12): 1151-62).

[0335] In some embodiments, it is of interest to reduce the susceptibility of the guide molecule to RNA cleavage, such as to cleavage by Cas13. Accordingly, in particular embodiments, the guide molecule is adjusted to avoid cleavage by Cas13 or other RNA-cleaving enzymes.

[0336] In certain embodiments, the guide molecule comprises non-naturally occurring nucleic acids and/or non-naturally occurring nucleotides and/or nucleotide analogs, and/or chemically modifications. Preferably, these non-naturally occurring nucleic acids and non-naturally occurring nucleotides are located outside the guide sequence. Non-naturally occurring nucleic acids can include, for example, mixtures of naturally and non-naturally occurring nucleotides. Non-naturally occurring nucleotides and/or nucleotide analogs may be modified at the ribose, phosphate, and/or base moiety. In an embodiment of the invention, a guide nucleic acid comprises ribonucleotides and non-ribonucleotides. In one such embodiment, a guide comprises one or more ribonucleotides and one or more deoxyribonucleotides. In an embodiment of the invention, the guide comprises one or more non-naturally occurring nucleotide or nucleotide analog such as a nucleotide with phosphorothioate linkage, a locked nucleic acid (LNA) nucleotides comprising a methylene bridge between the 2′ and 4′ carbons of the ribose ring, or bridged nucleic acids (BNA). Other examples of modified nucleotides include 2′-O-methyl analogs, 2′-deoxy analogs, or 2′-fluoro analogs. Further examples of modified bases include, but are not limited to, 2-aminopurine, 5-bromo-uridine, pseudouridine, inosine, 7-methylguanosine. Examples of guide RNA chemical modifications include, without limitation, incorporation of 2′-O-methyl (M), 2′-O-methyl 3′phosphorothioate (MS), S-constrained ethyl(cEt), or 2′-O-methyl 3′thioPACE (MSP) at one or more terminal nucleotides. Such chemically modified guides can comprise increased stability and increased activity as compared to unmodified guides, though on-target vs. off-target specificity is not predictable. (See, Hendel, 2015, Nat Biotechnol. 33(9):985-9, doi: 10.1038/nbt.3290, published online 29 Jun. 2015 Ragdarm et al., 0215, PNAS, E7110-E7111; Allerson et al., J. Med. Chem. 2005, 48:901-904; Bramsen et al., Front. Genet., 2012, 3:154; Deng et al., PNAS, 2015, 112:11870-11875; Sharma et al., MedChemComm., 2014, 5:1454-1471; Hendel et al., Nat. Biotechnol. (2015) 33(9): 985-989; Li et al., Nature Biomedical Engineering, 2017, 1, 0066 DOI:10.1038/s41551-017-0066). In some embodiments, the 5′ and/or 3′ end of a guide RNA is modified by a variety of functional moieties including fluorescent dyes, polyethylene glycol, cholesterol, proteins, or detection tags. (See Kelly et al., 2016, J. Biotech. 233:74-83). In certain embodiments, a guide comprises ribonucleotides in a region that binds to a target DNA and one or more deoxyribonucletides and/or nucleotide analogs in a region that binds to Cas13. In an embodiment of the invention, deoxyribonucleotides and/or nucleotide analogs are incorporated in engineered guide structures, such as, without limitation, stem-loop regions, and the seed region. For Cas13 guide, in certain embodiments, the modification is not in the 5′-handle of the stem-loop regions. Chemical modification in the 5′-handle of the stem-loop region of a guide may abolish its function (see Li, et al., Nature Biomedical Engineering, 2017, 1:0066). In certain embodiments, at least 1, 2, 3, 4, 5, 6, 7, 8, 9, 10, 11, 12, 13, 14, 15, 16, 17, 18, 19, 20, 21, 22, 23, 24, 25, 26, 27, 28, 29, 30, 35, 40, 45, 50, or 75 nucleotides of a guide is chemically modified. In some embodiments, 3-5 nucleotides at either the 3′ or the 5′ end of a guide is chemically modified. In some embodiments, only minor modifications are introduced in the seed region, such as 2′-F modifications. In some embodiments, 2′-F modification is introduced at the 3′ end of a guide. In certain embodiments, three to five nucleotides at the 5′ and/or the 3′ end of the guide are chemically modified with 2′-O-methyl (M), 2′-O-methyl 3′ phosphorothioate (MS), S-constrained ethyl(cEt), or 2′-O-methyl 3′ thioPACE (MSP). Such modification can enhance genome editing efficiency (see Hendel et al., Nat. Biotechnol. (2015) 33(9): 985-989). In certain embodiments, all of the phosphodiester bonds of a guide are substituted with phosphorothioates (PS) for enhancing levels of gene disruption. In certain embodiments, more than five nucleotides at the 5′ and/or the 3′ end of the guide are chemically modified with 2′-O-Me, 2′-F or S-constrained ethyl(cEt). Such chemically modified guide can mediate enhanced levels of gene disruption (see Ragdarm et al., 0215, PNAS, E7110-E7111). In an embodiment of the invention, a guide is modified to comprise a chemical moiety at its 3′ and/or 5′ end. Such moieties include, but are not limited to amine, azide, alkyne, thio, dibenzocyclooctyne (DBCO), or Rhodamine. In certain embodiment, the chemical moiety is conjugated to the guide by a linker, such as an alkyl chain. In certain embodiments, the chemical moiety of the modified guide can be used to attach the guide to another molecule, such as DNA, RNA, protein, or nanoparticles. Such chemically modified guide can be used to identify or enrich cells generically edited by a CRISPR system (see Lee et al., eLife, 2017, 6:e25312, DOI:10.7554).

[0337] In some embodiments, the guide comprises a modified Cas13 crRNA, having a 5′-handle and a guide segment further comprising a seed region and a 3′-terminus. In some embodiments, the modified guide can be used with a Cas13 of any one of Acidaminococcus sp. BV3L6 Cas13 (AsCas13); Francisella tularensis subsp. Novicida U112 Cas13 (FnCas13); L. bacterium MC2017 Cas13 (Lb3Cas13); Butyrivibrio proteoclasticus Cas13 (BpCas13); Parcubacteria bacterium GWC2011_GWC2_44_17 Cas13 (PbCas13); Peregrinibacteria bacterium GW2011_GWA_33_10 Cas13 (PeCas13); Leptospira inadai Cas13 (LiCas13); Smithella sp. SC_K08D17 Cas13 (SsCas13); L. bacterium MA2020 Cas13 (Lb2Cas13); Porphyromonas crevioricanis Cas13 (PcCas13); Porphyromonas macacae Cas13 (PmCas13); Candidatus Methanoplasma termitum Cas13 (CMtCas13); Eubacterium eligens Cas13 (EeCas13); Moraxella bovoculi 237 Cas13 (MbCas13); Prevotella disiens Cas13 (PdCas13); or L. bacterium ND2006 Cas13 (LbCas13).

[0338] In some embodiments, the modification to the guide is a chemical modification, an insertion, a deletion or a split. In some embodiments, the chemical modification includes, but is not limited to, incorporation of 2′-O-methyl (M) analogs, 2′-deoxy analogs, 2-thiouridine analogs, N6-methyladenosine analogs, 2′-fluoro analogs, 2-aminopurine, 5-bromo-uridine, pseudouridine (Ψ), N1-methylpseudouridine (me1Ψ), 5-methoxyuridine(5moU), inosine, 7-methylguanosine, 2′-O-methyl 3′phosphorothioate (MS), S-constrained ethyl(cEt), phosphorothioate (PS), or 2′-O-methyl 3′thioPACE (MSP). In some embodiments, the guide comprises one or more of phosphorothioate modifications. In certain embodiments, at least 1, 2, 3, 4, 5, 6, 7, 8, 9, 10, 11, 12, 13, 14, 15, 16, 17, 18, 19, 20, or 25 nucleotides of the guide are chemically modified. In certain embodiments, one or more nucleotides in the seed region are chemically modified. In certain embodiments, one or more nucleotides in the 3′-terminus are chemically modified. In certain embodiments, none of the nucleotides in the 5′-handle is chemically modified. In some embodiments, the chemical modification in the seed region is a minor modification, such as incorporation of a 2′-fluoro analog. In a specific embodiment, one nucleotide of the seed region is replaced with a 2′-fluoro analog. In some embodiments, 5 to 10 nucleotides in the 3′-terminus are chemically modified. Such chemical modifications at the 3′-terminus of the Cas13 CrRNA may improve Cas13 activity (see Li, et al., Nature Biomedical Engineering, 2017, 1:0066). In a specific embodiment, 1, 2, 3, 4, 5, 6, 7, 8, 9 or 10 nucleotides in the 3′-terminus are replaced with 2′-fluoro analogues. In a specific embodiment, 1, 2, 3, 4, 5, 6, 7, 8, 9 or 10 nucleotides in the 3′-terminus are replaced with 2′-O-methyl (M) analogs.

[0339] In some embodiments, the loop of the 5′-handle of the guide is modified. In some embodiments, the loop of the 5′-handle of the guide is modified to have a deletion, an insertion, a split, or chemical modifications. In certain embodiments, the modified loop comprises 3, 4, or 5 nucleotides. In certain embodiments, the loop comprises the sequence of UCUU, UUUU, UAUU, or UGUU.

[0340] In some embodiments, the guide molecule forms a stem loop with a separate non-covalently linked sequence, which can be DNA or RNA. In particular embodiments, the sequences forming the guide are first synthesized using the standard phosphoramidite synthetic protocol (Herdewijn, P., ed., Methods in Molecular Biology Col 288, Oligonucleotide Synthesis: Methods and Applications, Humana Press, New Jersey (2012)). In some embodiments, these sequences can be functionalized to contain an appropriate functional group for ligation using the standard protocol known in the art (Hermanson, G. T., Bioconjugate Techniques, Academic Press (2013)). Examples of functional groups include, but are not limited to, hydroxyl, amine, carboxylic acid, carboxylic acid halide, carboxylic acid active ester, aldehyde, carbonyl, chlorocarbonyl, imidazolylcarbonyl, hydrozide, semicarbazide, thio semicarbazide, thiol, maleimide, haloalkyl, sufonyl, ally, propargyl, diene, alkyne, and azide. Once this sequence is functionalized, a covalent chemical bond or linkage can be formed between this sequence and the direct repeat sequence. Examples of chemical bonds include, but are not limited to, those based on carbamates, ethers, esters, amides, imines, amidines, aminotrizines, hydrozone, disulfides, thioethers, thioesters, phosphorothioates, phosphorodithioates, sulfonamides, sulfonates, fulfones, sulfoxides, ureas, thioureas, hydrazide, oxime, triazole, photolabile linkages, C—C bond forming groups such as Diels-Alder cyclo-addition pairs or ring-closing metathesis pairs, and Michael reaction pairs.

[0341] In some embodiments, these stem-loop forming sequences can be chemically synthesized. In some embodiments, the chemical synthesis uses automated, solid-phase oligonucleotide synthesis machines with 2′-acetoxyethyl orthoester (2′-ACE) (Scaringe et al., J. Am. Chem. Soc. (1998) 120: 11820-11821; Scaringe, Methods Enzymol. (2000) 317: 3-18) or 2′-thionocarbamate (2′-TC) chemistry (Dellinger et al., J. Am. Chem. Soc. (2011) 133: 11540-11546; Hendel et al., Nat. Biotechnol. (2015) 33:985-989).

[0342] In certain embodiments, the guide molecule (capable of guiding Cas13 to a target locus) comprises (1) a guide sequence capable of hybridizing to a target locus and (2) a tracr mate or direct repeat sequence whereby the direct repeat sequence is located upstream (i.e., 5′) from the guide sequence. In a particular embodiment the seed sequence (i.e. the sequence essential critical for recognition and/or hybridization to the sequence at the target locus) of the Cas13 guide sequence is approximately within the first 10 nucleotides of the guide sequence. In particular embodiments, the Cas13 is FnCas13 and the seed sequence is approximately within the first 5 nt on the 5′ end of the guide sequence.

[0343] In a particular embodiment the guide molecule comprises a guide sequence linked to a direct repeat sequence, wherein the direct repeat sequence comprises one or more stem loops or optimized secondary structures. In particular embodiments, the direct repeat has a minimum length of 16 nts and a single stem loop. In further embodiments the direct repeat has a length longer than 16 nts, preferably more than 17 nts, and has more than one stem loops or optimized secondary structures. In particular embodiments the guide molecule comprises or consists of the guide sequence linked to all or part of the natural direct repeat sequence. A typical Type V Cas13 guide molecule comprises (in 3′ to 5′ direction): a guide sequence a first complimentary stretch (the “repeat”), a loop (which is typically 4 or 5 nucleotides long), a second complimentary stretch (the “anti-repeat” being complimentary to the repeat), and a poly A (often poly U in RNA) tail (terminator). In certain embodiments, the direct repeat sequence retains its natural architecture and forms a single stem loop. In particular embodiments, certain aspects of the guide architecture can be modified, for example by addition, subtraction, or substitution of features, whereas certain other aspects of guide architecture are maintained. Preferred locations for engineered guide molecule modifications, including but not limited to insertions, deletions, and substitutions include guide termini and regions of the guide molecule that are exposed when complexed with the Cas13 protein and/or target, for example the stemloop of the direct repeat sequence.

[0344] In particular embodiments, the stem comprises at least about 4 bp comprising complementary X and Y sequences, although stems of more, e.g., 5, 6, 7, 8, 9, 10, 11 or 12 or fewer, e.g., 3, 2, base pairs are also contemplated. Thus, for example X2-10 and Y2-10 (wherein X and Y represent any complementary set of nucleotides) may be contemplated. In one aspect, the stem made of the X and Y nucleotides, together with the loop will form a complete hairpin in the overall secondary structure; and, this may be advantageous and the amount of base pairs can be any amount that forms a complete hairpin. In one aspect, any complementary XY basepairing sequence (e.g., as to length) is tolerated, so long as the secondary structure of the entire guide molecule is preserved. In one aspect, the loop that connects the stem made of X:Y basepairs can be any sequence of the same length (e.g., 4 or 5 nucleotides) or longer that does not interrupt the overall secondary structure of the guide molecule. In one aspect, the stemloop can further comprise, e.g. an MS2 aptamer. In one aspect, the stem comprises about 5-7 bp comprising complementary X and Y sequences, although stems of more or fewer basepairs are also contemplated. In one aspect, non-Watson Crick basepairing is contemplated, where such pairing otherwise generally preserves the architecture of the stemloop at that position.

[0345] In particular embodiments the natural hairpin or stemloop structure of the guide molecule is extended or replaced by an extended stemloop. It has been demonstrated that extension of the stem can enhance the assembly of the guide molecule with the CRISPR-Cas protein (Chen et al. Cell. (2013); 155(7): 1479-1491). In particular embodiments the stem of the stemloop is extended by at least 1, 2, 3, 4, 5 or more complementary basepairs (i.e. corresponding to the addition of 2, 4, 6, 8, 10 or more nucleotides in the guide molecule). In particular embodiments these are located at the end of the stem, adjacent to the loop of the stemloop.

[0346] In particular embodiments, the susceptibility of the guide molecule to RNAses or to decreased expression can be reduced by slight modifications of the sequence of the guide molecule which do not affect its function. For instance, in particular embodiments, premature termination of transcription, such as premature transcription of U6 Pol-III, can be removed by modifying a putative Pol-III terminator (4 consecutive U's) in the guide molecules sequence. Where such sequence modification is required in the stemloop of the guide molecule, it is preferably ensured by a basepair flip.

[0347] In a preferred embodiment the direct repeat may be modified to comprise one or more protein-binding RNA aptamers. In a particular embodiment, one or more aptamers may be included such as part of optimized secondary structure. Such aptamers may be capable of binding a bacteriophage coat protein as detailed further herein.

[0348] In some embodiments, the guide molecule forms a duplex with a target DNA strand comprising at least one target adenosine residues to be edited. Upon hybridization of the guide RNA molecule to the target DNA strand, the nucleotide deaminase binds to the duplex and catalyzes deamination of one or more target adenosine residues comprised within the DNA-RNA duplex.

[0349] A guide sequence, and hence a nucleic acid-targeting guide RNA may be selected to target any target nucleic acid sequence. The target sequence may be DNA. The target sequence may be genomic DNA. The target sequence may be mitochondrial DNA.

[0350] In certain embodiments, the target sequence should be associated with a PAM (protospacer adjacent motif) or PFS (protospacer flanking sequence or site); that is, a short sequence recognized by the CRISPR complex. Depending on the nature of the CRISPR-Cas protein, the target sequence should be selected such that its complementary sequence in the DNA duplex (also referred to herein as the non-target sequence) is upstream or downstream of the PAM. In the embodiments of the present invention where the CRISPR-Cas protein is a Cas13 protein, the complementary sequence of the target sequence in a is downstream or 3′ of the PAM. The precise sequence and length requirements for the PAM differ depending on the Cas13 protein used, but PAMs are typically 2-5 base pair sequences adjacent the protospacer (that is, the target sequence). Examples of the natural PAM sequences for different Cas13 orthologues are provided herein below and the skilled person will be able to identify further PAM sequences for use with a given Cas13 protein.

[0351] Further, engineering of the PAM Interacting (PI) domain may allow programming of PAM specificity, improve target site recognition fidelity, and increase the versatility of the CRISPR-Cas protein, for example as described for Cas9 in Kleinstiver B P et al. Engineered CRISPR-Cas9 nucleases with altered PAM specificities. Nature. 2015 Jul. 23; 523(7561):481-5. doi: 10.1038/nature14592. As further detailed herein, the skilled person will understand that Cas13 proteins may be modified analogously.

[0352] In particular embodiments, the guide sequence is selected in order to ensure optimal efficiency of the deaminase on the adenine to be deaminated. The position of the adenine in the target strand relative to the cleavage site of the Cas13 nickase may be taken into account. In particular embodiments it is of interest to ensure that the nickase will act in the vicinity of the adenine to be deaminated, on the non-target strand. For instance, in particular embodiments, the Cas13 nickase cuts the non-targeting strand 17 nucleotides downstream of the PAM (e.g. AsCas13, LbCas13) or 18 nucleotides downstream of the PAM (e.g. FnCas13), and it can be of interest to design the guide that the cytosine which is to correspond to the adenine to be deaminated is located in the guide sequence within 10 bp upstream or downstream of the nickase cleavage site in the sequence of the corresponding non-target strand.

[0353] In particular embodiment, the guide is an escorted guide. By “escorted” is meant that the Cas13 CRISPR-Cas system or complex or guide is delivered to a selected time or place within a cell, so that activity of the Cas13 CRISPR-Cas system or complex or guide is spatially or temporally controlled. For example, the activity and destination of the Cas13 CRISPR-Cas system or complex or guide may be controlled by an escort RNA aptamer sequence that has binding affinity for an aptamer ligand, such as a cell surface protein or other localized cellular component. Alternatively, the escort aptamer may for example be responsive to an aptamer effector on or in the cell, such as a transient effector, such as an external energy source that is applied to the cell at a particular time.

[0354] The escorted Cas13 CRISPR-Cas systems or complexes have a guide molecule with a functional structure designed to improve guide molecule structure, architecture, stability, genetic expression, or any combination thereof. Such a structure can include an aptamer.

[0355] Aptamers are biomolecules that can be designed or selected to bind tightly to other ligands, for example using a technique called systematic evolution of ligands by exponential enrichment (SELEX; Tuerk C, Gold L: “Systematic evolution of ligands by exponential enrichment: RNA ligands to bacteriophage T4 DNA polymerase.” Science 1990, 249:505-510). Nucleic acid aptamers can for example be selected from pools of random-sequence oligonucleotides, with high binding affinities and specificities for a wide range of biomedically relevant targets, suggesting a wide range of therapeutic utilities for aptamers (Keefe, Anthony D., Supriya Pai, and Andrew Ellington. “Aptamers as therapeutics.” Nature Reviews Drug Discovery 9.7 (2010): 537-550). These characteristics also suggest a wide range of uses for aptamers as drug delivery vehicles (Levy-Nissenbaum, Etgar, et al. “Nanotechnology and aptamers: applications in drug delivery.” Trends in biotechnology 26.8 (2008): 442-449; and, Hicke B J, Stephens A W. “Escort aptamers: a delivery service for diagnosis and therapy.” J Clin Invest 2000, 106:923-928.). Aptamers may also be constructed that function as molecular switches, responding to a que by changing properties, such as RNA aptamers that bind fluorophores to mimic the activity of green fluorescent protein (Paige, Jeremy S., Karen Y. Wu, and Samie R. Jaffrey. “RNA mimics of green fluorescent protein.” Science 333.6042 (2011): 642-646). It has also been suggested that aptamers may be used as components of targeted siRNA therapeutic delivery systems, for example targeting cell surface proteins (Zhou, Jiehua, and John J. Rossi. “Aptamer-targeted cell-specific RNA interference.” Silence 1.1 (2010): 4).

[0356] Accordingly, in particular embodiments, the guide molecule is modified, e.g., by one or more aptamer(s) designed to improve guide molecule delivery, including delivery across the cellular membrane, to intracellular compartments, or into the nucleus. Such a structure can include, either in addition to the one or more aptamer(s) or without such one or more aptamer(s), moiety(ies) so as to render the guide molecule deliverable, inducible or responsive to a selected effector. The invention accordingly comprehends an guide molecule that responds to normal or pathological physiological conditions, including without limitation pH, hypoxia, 02 concentration, temperature, protein concentration, enzymatic concentration, lipid structure, light exposure, mechanical disruption (e.g. ultrasound waves), magnetic fields, electric fields, or electromagnetic radiation.

[0357] Light responsiveness of an inducible system may be achieved via the activation and binding of cryptochrome-2 and CIB1. Blue light stimulation induces an activating conformational change in cryptochrome-2, resulting in recruitment of its binding partner CIB1. This binding is fast and reversible, achieving saturation in <15 sec following pulsed stimulation and returning to baseline<15 min after the end of stimulation. These rapid binding kinetics result in a system temporally bound only by the speed of transcription/translation and transcript/protein degradation, rather than uptake and clearance of inducing agents. Crytochrome-2 activation is also highly sensitive, allowing for the use of low light intensity stimulation and mitigating the risks of phototoxicity. Further, in a context such as the intact mammalian brain, variable light intensity may be used to control the size of a stimulated region, allowing for greater precision than vector delivery alone may offer.

[0358] The invention contemplates energy sources such as electromagnetic radiation, sound energy or thermal energy to induce the guide. Advantageously, the electromagnetic radiation is a component of visible light. In a preferred embodiment, the light is a blue light with a wavelength of about 450 to about 495 nm. In an especially preferred embodiment, the wavelength is about 488 nm. In another preferred embodiment, the light stimulation is via pulses. The light power may range from about 0-9 mW/cm2. In a preferred embodiment, a stimulation paradigm of as low as 0.25 sec every 15 sec should result in maximal activation.

[0359] The chemical or energy sensitive guide may undergo a conformational change upon induction by the binding of a chemical source or by the energy allowing it act as a guide and have the Cas13 CRISPR-Cas system or complex function. The invention can involve applying the chemical source or energy so as to have the guide function and the Cas13 CRISPR-Cas system or complex function; and optionally further determining that the expression of the genomic locus is altered.

[0360] There are several different designs of this chemical inducible system: 1. ABI-PYL based system inducible by Abscisic Acid (ABA) (see, e.g., http://stke.sciencemag.org/cgi/content/abstract/sigtrans;4/164/rs2), 2. FKBP-FRB based system inducible by rapamycin (or related chemicals based on rapamycin) (see, e.g., http://www.nature.com/nmeth/journal/v2/n6/full/nmeth763.html), 3. GID1-GAI based system inducible by Gibberellin (GA) (see, e.g., http://www.nature.com/nchembio/journal/v8/n5/full/nchembio.922.html).

[0361] A chemical inducible system can be an estrogen receptor (ER) based system inducible by 4-hydroxytamoxifen (40HT) (see, e.g., http://www.pnas.org/content/104/3/1027.abstract). A mutated ligand-binding domain of the estrogen receptor called ERT2 translocate into the nucleus of cells upon binding of 4-hydroxytamoxifen. In further embodiments of the invention any naturally occurring or engineered derivative of any nuclear receptor, thyroid hormone receptor, retinoic acid receptor, estrogren receptor, estrogen-related receptor, glucocorticoid receptor, progesterone receptor, androgen receptor may be used in inducible systems analogous to the ER based inducible system.

[0362] Another inducible system is based on the design using Transient receptor potential (TRP) ion channel based system inducible by energy, heat or radio-wave (see, e.g., http://www.sciencemag.org/content/336/6081/604). These TRP family proteins respond to different stimuli, including light and heat. When this protein is activated by light or heat, the ion channel will open and allow the entering of ions such as calcium into the plasma membrane. This influx of ions will bind to intracellular ion interacting partners linked to a polypeptide including the guide and the other components of the Cas13 CRISPR-Cas complex or system, and the binding will induce the change of sub-cellular localization of the polypeptide, leading to the entire polypeptide entering the nucleus of cells. Once inside the nucleus, the guide protein and the other components of the Cas13 CRISPR-Cas complex will be active and modulating target gene expression in cells.

[0363] While light activation may be an advantageous embodiment, sometimes it may be disadvantageous especially for in vivo applications in which the light may not penetrate the skin or other organs. In this instance, other methods of energy activation are contemplated, in particular, electric field energy and/or ultrasound which have a similar effect.

[0364] Electric field energy is preferably administered substantially as described in the art, using one or more electric pulses of from about 1 Volt/cm to about 10 kVolts/cm under in vivo conditions. Instead of or in addition to the pulses, the electric field may be delivered in a continuous manner. The electric pulse may be applied for between 1 μs and 500 milliseconds, preferably between 1 μs and 100 milliseconds. The electric field may be applied continuously or in a pulsed manner for 5 about minutes.

[0365] As used herein, ‘electric field energy’ is the electrical energy to which a cell is exposed. Preferably the electric field has a strength of from about 1 Volt/cm to about 10 kVolts/cm or more under in vivo conditions (see WO97/49450).

[0366] As used herein, the term “electric field” includes one or more pulses at variable capacitance and voltage and including exponential and/or square wave and/or modulated wave and/or modulated square wave forms. References to electric fields and electricity should be taken to include reference the presence of an electric potential difference in the environment of a cell. Such an environment may be set up by way of static electricity, alternating current (AC), direct current (DC), etc, as known in the art. The electric field may be uniform, non-uniform or otherwise, and may vary in strength and/or direction in a time dependent manner.

[0367] Single or multiple applications of electric field, as well as single or multiple applications of ultrasound are also possible, in any order and in any combination. The ultrasound and/or the electric field may be delivered as single or multiple continuous applications, or as pulses (pulsatile delivery).

[0368] Electroporation has been used in both in vitro and in vivo procedures to introduce foreign material into living cells. Within vitro applications, a sample of live cells is first mixed with the agent of interest and placed between electrodes such as parallel plates. Then, the electrodes apply an electrical field to the cell/implant mixture. Examples of systems that perform in vitro electroporation include the Electro Cell Manipulator ECM600 product, and the Electro Square Porator T820, both made by the BTX Division of Genetronics, Inc (see U.S. Pat. No. 5,869,326).

[0369] The known electroporation techniques (both in vitro and in vivo) function by applying a brief high voltage pulse to electrodes positioned around the treatment region. The electric field generated between the electrodes causes the cell membranes to temporarily become porous, whereupon molecules of the agent of interest enter the cells. In known electroporation applications, this electric field comprises a single square wave pulse on the order of 1000 V/cm, of about 100·mu·s duration. Such a pulse may be generated, for example, in known applications of the Electro Square Porator T820.

[0370] Preferably, the electric field has a strength of from about 1 V/cm to about 10 kV/cm under in vitro conditions. Thus, the electric field may have a strength of 1 V/cm, 2 V/cm, 3 V/cm, 4 V/cm, 5 V/cm, 6 V/cm, 7 V/cm, 8 V/cm, 9 V/cm, 10 V/cm, 20 V/cm, 50 V/cm, 100 V/cm, 200 V/cm, 300 V/cm, 400 V/cm, 500 V/cm, 600 V/cm, 700 V/cm, 800 V/cm, 900 V/cm, 1 kV/cm, 2 kV/cm, 5 kV/cm, 10 kV/cm, 20 kV/cm, 50 kV/cm or more. More preferably from about 0.5 kV/cm to about 4.0 kV/cm under in vitro conditions. Preferably the electric field has a strength of from about 1 V/cm to about 10 kV/cm under in vivo conditions. However, the electric field strengths may be lowered where the number of pulses delivered to the target site are increased. Thus, pulsatile delivery of electric fields at lower field strengths is envisaged.

[0371] Preferably the application of the electric field is in the form of multiple pulses such as double pulses of the same strength and capacitance or sequential pulses of varying strength and/or capacitance. As used herein, the term “pulse” includes one or more electric pulses at variable capacitance and voltage and including exponential and/or square wave and/or modulated wave/square wave forms.

[0372] Preferably the electric pulse is delivered as a waveform selected from an exponential wave form, a square wave form, a modulated wave form and a modulated square wave form.

[0373] A preferred embodiment employs direct current at low voltage. Thus, Applicants disclose the use of an electric field which is applied to the cell, tissue or tissue mass at a field strength of between 1V/cm and 20V/cm, for a period of 100 milliseconds or more, preferably 15 minutes or more.

[0374] Ultrasound is advantageously administered at a power level of from about 0.05 W/cm2 to about 100 W/cm2. Diagnostic or therapeutic ultrasound may be used, or combinations thereof.

[0375] As used herein, the term “ultrasound” refers to a form of energy which consists of mechanical vibrations the frequencies of which are so high they are above the range of human hearing. Lower frequency limit of the ultrasonic spectrum may generally be taken as about 20 kHz. Most diagnostic applications of ultrasound employ frequencies in the range 1 and 15 MHz′ (From Ultrasonics in Clinical Diagnosis, P. N. T. Wells, ed., 2nd. Edition, Publ. Churchill Livingstone [Edinburgh, London & NY, 1977]).

[0376] Ultrasound has been used in both diagnostic and therapeutic applications. When used as a diagnostic tool (“diagnostic ultrasound”), ultrasound is typically used in an energy density range of up to about 100 mW/cm2 (FDA recommendation), although energy densities of up to 750 mW/cm2 have been used. In physiotherapy, ultrasound is typically used as an energy source in a range up to about 3 to 4 W/cm2 (WHO recommendation). In other therapeutic applications, higher intensities of ultrasound may be employed, for example, HIFU at 100 W/cm up to 1 kW/cm2 (or even higher) for short periods of time. The term “ultrasound” as used in this specification is intended to encompass diagnostic, therapeutic and focused ultrasound.

[0377] Focused ultrasound (FUS) allows thermal energy to be delivered without an invasive probe (see Morocz et al 1998 Journal of Magnetic Resonance Imaging Vol. 8, No. 1, pp. 136-142. Another form of focused ultrasound is high intensity focused ultrasound (HIFU) which is reviewed by Moussatov et al in Ultrasonics (1998) Vol. 36, No. 8, pp. 893-900 and TranHuuHue et al in Acustica (1997) Vol. 83, No. 6, pp. 1103-1106.

[0378] Preferably, a combination of diagnostic ultrasound and a therapeutic ultrasound is employed. This combination is not intended to be limiting, however, and the skilled reader will appreciate that any variety of combinations of ultrasound may be used. Additionally, the energy density, frequency of ultrasound, and period of exposure may be varied.

[0379] Preferably the exposure to an ultrasound energy source is at a power density of from about 0.05 to about 100 Wcm-2. Even more preferably, the exposure to an ultrasound energy source is at a power density of from about 1 to about 15 Wcm-2.

[0380] Preferably the exposure to an ultrasound energy source is at a frequency of from about 0.015 to about 10.0 MHz. More preferably the exposure to an ultrasound energy source is at a frequency of from about 0.02 to about 5.0 MHz or about 6.0 MHz. Most preferably, the ultrasound is applied at a frequency of 3 MHz.

[0381] Preferably the exposure is for periods of from about 10 milliseconds to about 60 minutes. Preferably the exposure is for periods of from about 1 second to about 5 minutes. More preferably, the ultrasound is applied for about 2 minutes. Depending on the particular target cell to be disrupted, however, the exposure may be for a longer duration, for example, for 15 minutes.

[0382] Advantageously, the target tissue is exposed to an ultrasound energy source at an acoustic power density of from about 0.05 Wcm-2 to about 10 Wcm-2 with a frequency ranging from about 0.015 to about 10 MHz (see WO 98/52609). However, alternatives are also possible, for example, exposure to an ultrasound energy source at an acoustic power density of above 100 Wcm-2, but for reduced periods of time, for example, 1000 Wcm-2 for periods in the millisecond range or less.

[0383] Preferably the application of the ultrasound is in the form of multiple pulses; thus, both continuous wave and pulsed wave (pulsatile delivery of ultrasound) may be employed in any combination. For example, continuous wave ultrasound may be applied, followed by pulsed wave ultrasound, or vice versa. This may be repeated any number of times, in any order and combination. The pulsed wave ultrasound may be applied against a background of continuous wave ultrasound, and any number of pulses may be used in any number of groups.

[0384] Preferably, the ultrasound may comprise pulsed wave ultrasound. In a highly preferred embodiment, the ultrasound is applied at a power density of 0.7 Wcm-2 or 1.25 Wcm-2 as a continuous wave. Higher power densities may be employed if pulsed wave ultrasound is used.

[0385] Use of ultrasound is advantageous as, like light, it may be focused accurately on a target. Moreover, ultrasound is advantageous as it may be focused more deeply into tissues unlike light. It is therefore better suited to whole-tissue penetration (such as but not limited to a lobe of the liver) or whole organ (such as but not limited to the entire liver or an entire muscle, such as the heart) therapy. Another important advantage is that ultrasound is a non-invasive stimulus which is used in a wide variety of diagnostic and therapeutic applications. By way of example, ultrasound is well known in medical imaging techniques and, additionally, in orthopedic therapy. Furthermore, instruments suitable for the application of ultrasound to a subject vertebrate are widely available and their use is well known in the art.

[0386] In particular embodiments, the guide molecule is modified by a secondary structure to increase the specificity of the CRISPR-Cas system and the secondary structure can protect against exonuclease activity and allow for 5′ additions to the guide sequence also referred to herein as a protected guide molecule.

[0387] In one aspect, the invention provides for hybridizing a “protector RNA” to a sequence of the guide molecule, wherein the “protector RNA” is an RNA strand complementary to the 3′ end of the guide molecule to thereby generate a partially double-stranded guide RNA. In an embodiment of the invention, protecting mismatched bases (i.e. the bases of the guide molecule which do not form part of the guide sequence) with a perfectly complementary protector sequence decreases the likelihood of target DNA binding to the mismatched basepairs at the 3′ end. In particular embodiments of the invention, additional sequences comprising an extended length may also be present within the guide molecule such that the guide comprises a protector sequence within the guide molecule. This “protector sequence” ensures that the guide molecule comprises a “protected sequence” in addition to an “exposed sequence” (comprising the part of the guide sequence hybridizing to the target sequence). In particular embodiments, the guide molecule is modified by the presence of the protector guide to comprise a secondary structure such as a hairpin. Advantageously there are three or four to thirty or more, e.g., about 10 or more, contiguous base pairs having complementarity to the protected sequence, the guide sequence or both. It is advantageous that the protected portion does not impede thermodynamics of the CRISPR-Cas system interacting with its target. By providing such an extension including a partially double stranded guide molecule, the guide molecule is considered protected and results in improved specific binding of the CRISPR-Cas complex, while maintaining specific activity.

[0388] In particular embodiments, use is made of a truncated guide (tru-guide), i.e. a guide molecule which comprises a guide sequence which is truncated in length with respect to the canonical guide sequence length. As described by Nowak et al. (Nucleic Acids Res (2016) 44 (20): 9555-9564), such guides may allow catalytically active CRISPR-Cas enzyme to bind its target without cleaving the target DNA. In particular embodiments, a truncated guide is used which allows the binding of the target but retains only nickase activity of the CRISPR-Cas enzyme.

### Determination of PAM

[0389] Determination of PAM can be ensured as follows. This experiment closely parallels similar work in E. coli for the heterologous expression of StCas9 (Sapranauskas, R. et al. Nucleic Acids Res 39, 9275-9282 (2011)). Applicants introduce a plasmid containing both a PAM and a resistance gene into the heterologous E. coli, and then plate on the corresponding antibiotic. If there is DNA cleavage of the plasmid, Applicants observe no viable colonies.

[0390] In further detail, the assay is as follows for a DNA target. Two E. coli strains are used in this assay. One carries a plasmid that encodes the endogenous effector protein locus from the bacterial strain. The other strain carries an empty plasmid (e.g.pACYC184, control strain). All possible 7 or 8 bp PAM sequences are presented on an antibiotic resistance plasmid (pUC19 with ampicillin resistance gene). The PAM is located next to the sequence of proto-spacer 1 (the DNA target to the first spacer in the endogenous effector protein locus). Two PAM libraries were cloned. One has a 8 random bp 5′ of the proto-spacer (e.g. total of 65536 different PAM sequences=complexity). The other library has 7 random bp 3′ of the proto-spacer (e.g. total complexity is 16384 different PAMs). Both libraries were cloned to have in average 500 plasmids per possible PAM. Test strain and control strain were transformed with 5′PAM and 3′PAM library in separate transformations and transformed cells were plated separately on ampicillin plates. Recognition and subsequent cutting/interference with the plasmid renders a cell vulnerable to ampicillin and prevents growth. Approximately 12 h after transformation, all colonies formed by the test and control strains where harvested and plasmid DNA was isolated. Plasmid DNA was used as template for PCR amplification and subsequent deep sequencing. Representation of all PAMs in the untransfomed libraries showed the expected representation of PAMs in transformed cells. Representation of all PAMs found in control strains showed the actual representation. Representation of all PAMs in test strain showed which PAMs are not recognized by the enzyme and comparison to the control strain allows extracting the sequence of the depleted PAM.

[0391] The following PAMs have been identified for certain wild-type Cas13 orthologues: the Acidaminococcus sp. BV3L6 Cas13 (AsCas13), Lachnospiraceae bacterium ND2006 Cas13 (LbCas13) and Prevotella albensis (Pa Cas13) can cleave target sites preceded by a TTTV PAM, where V is A/C or G, FnCas13p, can cleave sites preceded by TTN, where N is A/C/G or T. The Moraxella bovoculi AAX08_00205, Moraxella bovoculi AAX11_00205, Butyrivibrio sp. NC3005, Thiomicrospira sp. XS5, or Lachnospiraceae bacterium MA2020 PAM is 5′ TTN, where N is A/C/G or T. The natural PAM sequence is TTTV or BTTV, wherein B is T/C or G and V is A/C or G and the effector protein is Moraxella lacunata Cas13.

### Codon Optimized Nucleic Acid Sequences

[0392] Where the effector protein is to be administered as a nucleic acid, the application envisages the use of codon-optimized CRISPR-Cas type V protein, and more particularly Cas13-encoding nucleic acid sequences (and optionally protein sequences). An example of a codon optimized sequence, is in this instance a sequence optimized for expression in a eukaryote, e.g., humans (i.e. being optimized for expression in humans), or for another eukaryote, animal or mammal as herein discussed; see, e.g., SaCas9 human codon optimized sequence in WO 2014/093622 (PCT/US2013/074667) as an example of a codon optimized sequence (from knowledge in the art and this disclosure, codon optimizing coding nucleic acid molecule(s), especially as to effector protein (e.g., Cas13) is within the ambit of the skilled artisan). Whilst this is preferred, it will be appreciated that other examples are possible and codon optimization for a host species other than human, or for codon optimization for specific organs is known. In some embodiments, an enzyme coding sequence encoding a DNA/RNA-targeting Cas protein is codon optimized for expression in particular cells, such as eukaryotic cells. The eukaryotic cells may be those of or derived from a particular organism, such as a plant or a mammal, including but not limited to human, or non-human eukaryote or animal or mammal as herein discussed, e.g., mouse, rat, rabbit, dog, livestock, or non-human mammal or primate. In some embodiments, processes for modifying the germ line genetic identity of human beings and/or processes for modifying the genetic identity of animals which are likely to cause them suffering without any substantial medical benefit to man or animal, and also animals resulting from such processes, may be excluded. In general, codon optimization refers to a process of modifying a nucleic acid sequence for enhanced expression in the host cells of interest by replacing at least one codon (e.g., about or more than about 1, 2, 3, 4, 5, 10, 15, 20, 25, 50, or more codons) of the native sequence with codons that are more frequently or most frequently used in the genes of that host cell while maintaining the native amino acid sequence. Various species exhibit particular bias for certain codons of a particular amino acid. Codon bias (differences in codon usage between organisms) often correlates with the efficiency of translation of messenger RNA (mRNA), which is in turn believed to be dependent on, among other things, the properties of the codons being translated and the availability of particular transfer RNA (tRNA) molecules. The predominance of selected tRNAs in a cell is generally a reflection of the codons used most frequently in peptide synthesis. Accordingly, genes can be tailored for optimal gene expression in a given organism based on codon optimization. Codon usage tables are readily available, for example, at the “Codon Usage Database” available at www.kazusa.orjp/codon/and these tables can be adapted in a number of ways. See Nakamura, Y., et al. “Codon usage tabulated from the international DNA sequence databases: status for the year 2000” Nucl. Acids Res. 28:292 (2000). Computer algorithms for codon optimizing a particular sequence for expression in a particular host cell are also available, such as Gene Forge (Aptagen; Jacobus, Pa.), are also available. In some embodiments, one or more codons (e.g., 1, 2, 3, 4, 5, 10, 15, 20, 25, 50, or more, or all codons) in a sequence encoding a DNA/RNA-targeting Cas protein corresponds to the most frequently used codon for a particular amino acid. As to codon usage in yeast, reference is made to the online Yeast Genome database available at http://www.yeastgenome.org/community/codon_usage.shtml, or Codon selection in yeast, Bennetzen and Hall, J Biol Chem. 1982 Mar. 25; 257(6):3026-31. As to codon usage in plants including algae, reference is made to Codon usage in higher plants, green algae, and cyanobacteria, Campbell and Gowri, Plant Physiol. 1990 January; 92(1): 1-11; as well as Codon usage in plant genes, Murray et al, Nucleic Acids Res. 1989 Jan. 25; 17(2):477-98; or Selection on the codon bias of chloroplast and cyanelle genes in different plant and algal lineages, Morton B R, J Mol Evol. 1998 April; 46(4):449-59.

### Adenosine Deaminase

[0393] The system may further comprise an adenosine deaminase or catalytic domain thereof. The adenosine deaminase protein or catalytic domain thereof deaminates an Adenine or Cytidine at the one or more codons thereby changing the codon to encode for an amino acid that is not post-translationally modified. The term “adenosine deaminase” or “adenosine deaminase protein” as used herein refers to a protein, a polypeptide, or one or more functional domain(s) of a protein or a polypeptide that is capable of catalyzing a hydrolytic deamination reaction that converts an adenine (or an adenine moiety of a molecule) to a hypoxanthine (or a hypoxanthine moiety of a molecule), as shown below. In some embodiments, the adenine-containing molecule is an adenosine (A), and the hypoxanthine-containing molecule is an inosine (I). The adenine-containing molecule can be deoxyribonucleic acid (DNA) or ribonucleic acid (RNA).

[chemical structure]

[0394] According to the present disclosure, adenosine deaminases that can be used in connection with the present disclosure include, but are not limited to, members of the enzyme family known as adenosine deaminases that act on RNA (ADARs), members of the enzyme family known as adenosine deaminases that act on tRNA (ADATs), and other adenosine deaminase domain-containing (ADAD) family members. According to the present disclosure, the adenosine deaminase is capable of targeting adenine in a RNA/DNA and RNA duplexes. Indeed, Zheng et al. (Nucleic Acids Res. 2017, 45(6): 3369-3377) demonstrate that ADARs can carry out adenosine to inosine editing reactions on RNA/DNA and RNA/RNA duplexes. In particular embodiments, the adenosine deaminase has been modified to increase its ability to edit DNA in a RNA/DNAn RNA duplex as detailed herein below.

[0395] In some embodiments, the adenosine deaminase is derived from one or more metazoa species, including but not limited to, mammals, birds, frogs, squids, fish, flies and worms. In some embodiments, the adenosine deaminase is a human, cephalopod (e.g., squid) or Drosophila adenosine deaminase. In certain examples, the adenosine deaminase is a human adenosine deaminase. In certain examples, the adenosine deaminase is a cephalopod adenosine deaminase. In certain examples, the adenosine deaminase is a Drosophila adenosine deaminase.

[0396] In some embodiments, the adenosine deaminase is a human ADAR, including hADAR1, hADAR2, hADAR3. In some cases, the adenosine deaminase is hADAR1. In some cases, the adenosine deaminase is hADAR2. In some cases, the adenosine deaminase is hADAR3. In some embodiments, the adenosine deaminase is a Caenorhabditis elegans ADAR protein, including ADR-1 and ADR-2. In some embodiments, the adenosine deaminase is a Drosophila ADAR protein, including dAdar. In some embodiments, the adenosine deaminase is a squid Loligo pealeii ADAR protein, including sqADAR2a and sqADAR2b. In some embodiments, the adenosine deaminase is a human ADAT protein. In some embodiments, the adenosine deaminase is a Drosophila ADAT protein. In some embodiments, the adenosine deaminase is a human ADAD protein, including TENR (hADAD1) and TENRL (hADAD2).

[0397] In some embodiments, the adenosine deaminase protein recognizes and converts one or more target adenosine residue(s) in a double-stranded nucleic acid substrate into inosine residues (s). In some embodiments, the double-stranded nucleic acid substrate is a RNA-DNA hybrid duplex. In some embodiments, the adenosine deaminase protein recognizes a binding window on the double-stranded substrate. In some embodiments, the binding window contains at least one target adenosine residue(s). In some embodiments, the binding window is in the range of about 3 bp to about 100 bp. In some embodiments, the binding window is in the range of about 5 bp to about 50 bp. In some embodiments, the binding window is in the range of about 10 bp to about 30 bp. In some embodiments, the binding window is about 1 bp, 2 bp, 3 bp, 5 bp, 7 bp, 10 bp, 15 bp, 20 bp, 25 bp, 30 bp, 40 bp, 45 bp, 50 bp, 55 bp, 60 bp, 65 bp, 70 bp, 75 bp, 80 bp, 85 bp, 90 bp, 95 bp, or 100 bp.

[0398] In some embodiments, the adenosine deaminase protein comprises one or more deaminase domains. Not intended to be bound by theory, it is contemplated that the deaminase domain functions to recognize and convert one or more target adenosine (A) residue(s) contained in a double-stranded nucleic acid substrate into inosine (I) residues (s). In some embodiments, the deaminase domain comprises an active center. In some embodiments, the active center comprises a zinc ion. In some embodiments, during the A-to-I editing process, base pairing at the target adenosine residue is disrupted, and the target adenosine residue is “flipped” out of the double helix to become accessible by the adenosine deaminase. In some embodiments, amino acid residues in or near the active center interact with one or more nucleotide(s) 5′ to a target adenosine residue. In some embodiments, amino acid residues in or near the active center interact with one or more nucleotide(s) 3′ to a target adenosine residue. In some embodiments, amino acid residues in or near the active center further interact with the nucleotide complementary to the target adenosine residue on the opposite strand. In some embodiments, the amino acid residues form hydrogen bonds with the 2′ hydroxyl group of the nucleotides.

[0399] In some embodiments, the adenosine deaminase comprises human ADAR2 full protein (hADAR2) or the deaminase domain thereof (hADAR2-D). In some embodiments, the adenosine deaminase is an ADAR family member that is homologous to hADAR2 or hADAR2-D.

[0400] Particularly, in some embodiments, the homologous ADAR protein is human ADAR1 (hADAR1) or the deaminase domain thereof (hADAR1-D). In some embodiments, glycine 1007 of hADAR1-D corresponds to glycine 487 hADAR2-D, and glutamic Acid 1008 of hADAR1-D corresponds to glutamic acid 488 of hADAR2-D.

[0401] In some embodiments, the adenosine deaminase comprises the wild-type amino acid sequence of hADAR2-D. In some embodiments, the adenosine deaminase comprises one or more mutations in the hADAR2-D sequence, such that the editing efficiency, and/or substrate editing preference of hADAR2-D is changed according to specific needs. Certain mutations of hADAR1 and hADAR2 proteins have been described in Kuttan et al., Proc Natl Acad Sci USA. (2012) 109(48):E3295-304; Want et al. ACS Chem Biol. (2015) 10(11):2512-9; and Zheng et al. Nucleic Acids Res. (2017) 45(6):3369-337, each of which is incorporated herein by reference in its entirety.

[0402] In some embodiments, the adenosine deaminase comprises a mutation at glycine336 of the hADAR2-D amino acid sequence, or a corresponding position in a homologous ADAR protein. In some embodiments, the glycine residue at position 336 is replaced by an aspartic acid residue (G336D).

In some embodiments, the adenosine deaminase comprises a mutation at Glycine487 of the hADAR2-D amino acid sequence, or a corresponding position in a homologous ADAR protein. In some embodiments, the glycine residue at position 487 is replaced by a non-polar amino acid residue with relatively small side chains. For example, in some embodiments, the glycine residue at position 487 is replaced by an alanine residue (G487A). In some embodiments, the glycine residue at position 487 is replaced by a valine residue (G487V). In some embodiments, the glycine residue at position 487 is replaced by an amino acid residue with relatively large side chains. In some embodiments, the glycine residue at position 487 is replaced by a arginine residue (G487R). In some embodiments, the glycine residue at position 487 is replaced by a lysine residue (G487K). In some embodiments, the glycine residue at position 487 is replaced by a tryptophan residue (G487W). In some embodiments, the glycine residue at position 487 is replaced by a tyrosine residue (G487Y).

[0403] In some embodiments, the adenosine deaminase comprises a mutation at glutamic acid488 of the hADAR2-D amino acid sequence, or a corresponding position in a homologous ADAR protein. In some embodiments, the glutamic acid residue at position 488 is replaced by a glutamine residue (E488Q). In some embodiments, the glutamic acid residue at position 488 is replaced by a histidine residue (E488H). In some embodiments, the glutamic acid residue at position 488 is replace by an arginine residue (E488R). In some embodiments, the glutamic acid residue at position 488 is replace by a lysine residue (E488K). In some embodiments, the glutamic acid residue at position 488 is replace by an asparagine residue (E488N). In some embodiments, the glutamic acid residue at position 488 is replace by an alanine residue (E488A). In some embodiments, the glutamic acid residue at position 488 is replace by a Methionine residue (E488M). In some embodiments, the glutamic acid residue at position 488 is replace by a serine residue (E488S). In some embodiments, the glutamic acid residue at position 488 is replace by a phenylalanine residue (E488F). In some embodiments, the glutamic acid residue at position 488 is replace by a lysine residue (E488L). In some embodiments, the glutamic acid residue at position 488 is replace by a tryptophan residue (E488W).

[0404] In some embodiments, the adenosine deaminase comprises a mutation at threonine490 of the hADAR2-D amino acid sequence, or a corresponding position in a homologous ADAR protein. In some embodiments, the threonine residue at position 490 is replaced by a cysteine residue (T490C). In some embodiments, the threonine residue at position 490 is replaced by a serine residue (T490S). In some embodiments, the threonine residue at position 490 is replaced by an alanine residue (T490A). In some embodiments, the threonine residue at position 490 is replaced by a phenylalanine residue (T490F). In some embodiments, the threonine residue at position 490 is replaced by a tyrosine residue (T490Y). In some embodiments, the threonine residue at position 490 is replaced by a serine residue (T490R). In some embodiments, the threonine residue at position 490 is replaced by an alanine residue (T490K). In some embodiments, the threonine residue at position 490 is replaced by a phenylalanine residue (T490P). In some embodiments, the threonine residue at position 490 is replaced by a tyrosine residue (T490E).

[0405] In some embodiments, the adenosine deaminase comprises a mutation at valine493 of the hADAR2-D amino acid sequence, or a corresponding position in a homologous ADAR protein. In some embodiments, the valine residue at position 493 is replaced by an alanine residue (V493A). In some embodiments, the valine residue at position 493 is replaced by a serine residue (V493S). In some embodiments, the valine residue at position 493 is replaced by a threonine residue (V493T). In some embodiments, the valine residue at position 493 is replaced by an arginine residue (V493R). In some embodiments, the valine residue at position 493 is replaced by an aspartic acid residue (V493D). In some embodiments, the valine residue at position 493 is replaced by a proline residue (V493P). In some embodiments, the valine residue at position 493 is replaced by a glycine residue (V493G).

[0406] In some embodiments, the adenosine deaminase comprises a mutation at alanine589 of the hADAR2-D amino acid sequence, or a corresponding position in a homologous ADAR protein. In some embodiments, the alanine residue at position 589 is replaced by a valine residue (A589V).

[0407] In some embodiments, the adenosine deaminase comprises a mutation at asparagine597 of the hADAR2-D amino acid sequence, or a corresponding position in a homologous ADAR protein. In some embodiments, the asparagine residue at position 597 is replaced by a lysine residue (N597K). In some embodiments, the adenosine deaminase comprises a mutation at position 597 of the amino acid sequence, which has an asparagine residue in the wild type sequence. In some embodiments, the asparagine residue at position 597 is replaced by an arginine residue (N597R). In some embodiments, the adenosine deaminase comprises a mutation at position 597 of the amino acid sequence, which has an asparagine residue in the wild type sequence. In some embodiments, the asparagine residue at position 597 is replaced by an alanine residue (N597A). In some embodiments, the adenosine deaminase comprises a mutation at position 597 of the amino acid sequence, which has an asparagine residue in the wild type sequence. In some embodiments, the asparagine residue at position 597 is replaced by a glutamic acid residue (N597E). In some embodiments, the adenosine deaminase comprises a mutation at position 597 of the amino acid sequence, which has an asparagine residue in the wild type sequence. In some embodiments, the asparagine residue at position 597 is replaced by a histidine residue (N597H). In some embodiments, the adenosine deaminase comprises a mutation at position 597 of the amino acid sequence, which has an asparagine residue in the wild type sequence. In some embodiments, the asparagine residue at position 597 is replaced by a glycine residue (N597G). In some embodiments, the adenosine deaminase comprises a mutation at position 597 of the amino acid sequence, which has an asparagine residue in the wild type sequence. In some embodiments, the asparagine residue at position 597 is replaced by a tyrosine residue (N597Y). In some embodiments, the asparagine residue at position 597 is replaced by a phenylalanine residue (N597F). In some embodiments, the adenosine deaminase comprises mutation N597I. In some embodiments, the adenosine deaminase comprises mutation N597L. In some embodiments, the adenosine deaminase comprises mutation N597V. In some embodiments, the adenosine deaminase comprises mutation N597M. In some embodiments, the adenosine deaminase comprises mutation N597C. In some embodiments, the adenosine deaminase comprises mutation N597P. In some embodiments, the adenosine deaminase comprises mutation N597T. In some embodiments, the adenosine deaminase comprises mutation N597S. In some embodiments, the adenosine deaminase comprises mutation N597W. In some embodiments, the adenosine deaminase comprises mutation N597Q. In some embodiments, the adenosine deaminase comprises mutation N597D. In certain example embodiments, the mutations at N597 described above are further made in the context of an E488Q background.

[0408] In some embodiments, the adenosine deaminase comprises a mutation at serine599 of the hADAR2-D amino acid sequence, or a corresponding position in a homologous ADAR protein. In some embodiments, the serine residue at position 599 is replaced by a threonine residue (S599T).

[0409] In some embodiments, the adenosine deaminase comprises a mutation at asparagine613 of the hADAR2-D amino acid sequence, or a corresponding position in a homologous ADAR protein. In some embodiments, the asparagine residue at position 613 is replaced by a lysine residue (N613K). In some embodiments, the adenosine deaminase comprises a mutation at position 613 of the amino acid sequence, which has an asparagine residue in the wild type sequence. In some embodiments, the asparagine residue at position 613 is replaced by an arginine residue (N613R). In some embodiments, the adenosine deaminase comprises a mutation at position 613 of the amino acid sequence, which has an asparagine residue in the wild type sequence. In some embodiments, the asparagine residue at position 613 is replaced by an alanine residue (N613A) In some embodiments, the adenosine deaminase comprises a mutation at position 613 of the amino acid sequence, which has an asparagine residue in the wild type sequence. In some embodiments, the asparagine residue at position 613 is replaced by a glutamic acid residue (N613E). In some embodiments, the adenosine deaminase comprises mutation N613I. In some embodiments, the adenosine deaminase comprises mutation N613L. In some embodiments, the adenosine deaminase comprises mutation N613V. In some embodiments, the adenosine deaminase comprises mutation N613F. In some embodiments, the adenosine deaminase comprises mutation N613M. In some embodiments, the adenosine deaminase comprises mutation N613C. In some embodiments, the adenosine deaminase comprises mutation N613G. In some embodiments, the adenosine deaminase comprises mutation N613P. In some embodiments, the adenosine deaminase comprises mutation N613T. In some embodiments, the adenosine deaminase comprises mutation N613S. In some embodiments, the adenosine deaminase comprises mutation N613Y. In some embodiments, the adenosine deaminase comprises mutation N613W. In some embodiments, the adenosine deaminase comprises mutation N613Q. In some embodiments, the adenosine deaminase comprises mutation N613H. In some embodiments, the adenosine deaminase comprises mutation N613D. In some embodiments, the mutations at N613 described above are further made in combination with a E488Q mutation.

[0410] In some embodiments, to improve editing efficiency, the adenosine deaminase may comprise one or more of the mutations: G336D, G487A, G487V, E488Q, E488H, E488R, E488N, E488A, E488S, E488M, T490C, T490S, V493T, V493S, V493A, V493R, V493D, V493P, V493G, N597K, N597R, N597A, N597E, N597H, N597G, N597Y, A589V, S599T, N613K, N613R, N613A, N613E, based on amino acid sequence positions of hADAR2-D, and mutations in a homologous ADAR protein corresponding to the above.

[0411] In some embodiments, to reduce editing efficiency, the adenosine deaminase may comprise one or more of the mutations: E488F, E488L, E488W, T490A, T490F, T490Y, T490R, T490K, T490P, T490E, N597F, based on amino acid sequence positions of hADAR2-D, and mutations in a homologous ADAR protein corresponding to the above. In particular embodiments, it can be of interest to use an adenosine deaminase enzyme with reduced efficacy to reduce off-target effects.

[0412] In some embodiments, to reduce off-target effects, the adenosine deaminase comprises one or more of mutations at R348, V351, T375, K376, E396, C451, R455, N473, R474, K475, R477, R481, S486, E488, T490, S495, R510, based on amino acid sequence positions of hADAR2-D, and mutations in a homologous ADAR protein corresponding to the above. In some embodiments, the adenosine deaminase comprises mutation at E488 and one or more additional positions selected from R348, V351, T375, K376, E396, C451, R455, N473, R474, K475, R477, R481, S486, T490, S495, R510. In some embodiments, the adenosine deaminase comprises mutation at T375, and optionally at one or more additional positions. In some embodiments, the adenosine deaminase comprises mutation at N473, and optionally at one or more additional positions. In some embodiments, the adenosine deaminase comprises mutation at V351, and optionally at one or more additional positions. In some embodiments, the adenosine deaminase comprises mutation at E488 and T375, and optionally at one or more additional positions. In some embodiments, the adenosine deaminase comprises mutation at E488 and N473, and optionally at one or more additional positions. In some embodiments, the adenosine deaminase comprises mutation E488 and V351, and optionally at one or more additional positions. In some embodiments, the adenosine deaminase comprises mutation at E488 and one or more of T375, N473, and V351.

[0413] In some embodiments, to reduce off-target effects, the adenosine deaminase comprises one or more of mutations selected from R348E, V351L, T375G, T375S, R455G, R455S, R455E, N473D, R474E, K475Q, R477E, R481E, S486T, E488Q, T490A, T490S, S495T, and R510E, based on amino acid sequence positions of hADAR2-D, and mutations in a homologous ADAR protein corresponding to the above. In some embodiments, the adenosine deaminase comprises mutation E488Q and one or more additional mutations selected from R348E, V351L, T375G, T375S, R455G, R455S, R455E, N473D, R474E, K475Q, R477E, R481E, S486T, T490A, T490S, S495T, and R510E. In some embodiments, the adenosine deaminase comprises mutation T375G or T375S, and optionally one or more additional mutations. In some embodiments, the adenosine deaminase comprises mutation N473D, and optionally one or more additional mutations. In some embodiments, the adenosine deaminase comprises mutation V351L, and optionally one or more additional mutations. In some embodiments, the adenosine deaminase comprises mutation E488Q, and T375G or T375G, and optionally one or more additional mutations. In some embodiments, the adenosine deaminase comprises mutation E488Q and N473D, and optionally one or more additional mutations. In some embodiments, the adenosine deaminase comprises mutation E488Q and V351L, and optionally one or more additional mutations. In some embodiments, the adenosine deaminase comprises mutation E488Q and one or more of T375G/S, N473D and V351L.

[0414] In certain examples, the adenosine deaminase protein or catalytic domain thereof has been modified to comprise a mutation at E488, preferably E488Q, of the hADAR2-D amino acid sequence, or a corresponding position in a homologous ADAR protein and/or wherein the adenosine deaminase protein or catalytic domain thereof has been modified to comprise a mutation at T375, preferably T375G of the hADAR2-D amino acid sequence, or a corresponding position in a homologous ADAR protein. In certain examples, the adenosine deaminase protein or catalytic domain thereof has been modified to comprise a mutation at E1008, preferably E1008Q, of the hADAR1d amino acid sequence, or a corresponding position in a homologous ADAR protein. In certain examples, the adenosine deaminase protein or catalytic domain thereof has been modified to comprise one or more mutation as provided in any of FIGS. 43A-43D, 44, 45, 46A-46B, 47A-47B, or a corresponding mutation in an ADAR homolog or ortholog.

[0415] Crystal structures of the human ADAR2 deaminase domain bound to duplex RNA reveal a protein loop that binds the RNA on the 5′ side of the modification site. This 5′ binding loop is one contributor to substrate specificity differences between ADAR family members. See Wang et al., Nucleic Acids Res., 44(20):9872-9880 (2016), the content of which is incorporated herein by reference in its entirety. In addition, an ADAR2-specific RNA-binding loop was identified near the enzyme active site. See Mathews et al., Nat. Struct. Mol. Biol., 23(5):426-33 (2016), the content of which is incorporated herein by reference in its entirety. In some embodiments, the adenosine deaminase comprises one or more mutations in the RNA binding loop to improve editing specificity and/or efficiency.

[0416] In some embodiments, the adenosine deaminase comprises a mutation at alanine454 of the hADAR2-D amino acid sequence, or a corresponding position in a homologous ADAR protein. In some embodiments, the alanine residue at position 454 is replaced by a serine residue (A454S). In some embodiments, the alanine residue at position 454 is replaced by a cysteine residue (A454C). In some embodiments, the alanine residue at position 454 is replaced by an aspartic acid residue (A454D).

[0417] In some embodiments, the adenosine deaminase comprises a mutation at arginine455 of the hADAR2-D amino acid sequence, or a corresponding position in a homologous ADAR protein. In some embodiments, the arginine residue at position 455 is replaced by an alanine residue (R455A). In some embodiments, the arginine residue at position 455 is replaced by a valine residue (R455V). In some embodiments, the arginine residue at position 455 is replaced by a histidine residue (R455H). In some embodiments, the arginine residue at position 455 is replaced by a glycine residue (R455G). In some embodiments, the arginine residue at position 455 is replaced by a serine residue (R455S). In some embodiments, the arginine residue at position 455 is replaced by a glutamic acid residue (R455E). In some embodiments, the adenosine deaminase comprises mutation R455C. In some embodiments, the adenosine deaminase comprises mutation R455. In some embodiments, the adenosine deaminase comprises mutation R455K. In some embodiments, the adenosine deaminase comprises mutation R455L. In some embodiments, the adenosine deaminase comprises mutation R455M. In some embodiments, the adenosine deaminase comprises mutation R455N. In some embodiments, the adenosine deaminase comprises mutation R455Q. In some embodiments, the adenosine deaminase comprises mutation R455F. In some embodiments, the adenosine deaminase comprises mutation R455W. In some embodiments, the adenosine deaminase comprises mutation R455P. In some embodiments, the adenosine deaminase comprises mutation R455Y. In some embodiments, the adenosine deaminase comprises mutation R455E. In some embodiments, the adenosine deaminase comprises mutation R455D. In some embodiments, the mutations at R455 described above are further made in combination with a E488Q mutation.

[0418] In some embodiments, the adenosine deaminase comprises a mutation at isoleucine456 of the hADAR2-D amino acid sequence, or a corresponding position in a homologous ADAR protein. In some embodiments, the isoleucine residue at position 456 is replaced by a valine residue (I456V). In some embodiments, the isoleucine residue at position 456 is replaced by a leucine residue (I456L). In some embodiments, the isoleucine residue at position 456 is replaced by an aspartic acid residue (I456D).

[0419] In some embodiments, the adenosine deaminase comprises a mutation at phenylalanine457 of the hADAR2-D amino acid sequence, or a corresponding position in a homologous ADAR protein. In some embodiments, the phenylalanine residue at position 457 is replaced by a tyrosine residue (F457Y). In some embodiments, the phenylalanine residue at position 457 is replaced by an arginine residue (F457R). In some embodiments, the phenylalanine residue at position 457 is replaced by a glutamic acid residue (F457E).

[0420] In some embodiments, the adenosine deaminase comprises a mutation at serine458 of the hADAR2-D amino acid sequence, or a corresponding position in a homologous ADAR protein. In some embodiments, the serine residue at position 458 is replaced by a valine residue (S458V). In some embodiments, the serine residue at position 458 is replaced by a phenylalanine residue (S458F). In some embodiments, the serine residue at position 458 is replaced by a proline residue (S458P). In some embodiments, the adenosine deaminase comprises mutation S458I. In some embodiments, the adenosine deaminase comprises mutation S458L. In some embodiments, the adenosine deaminase comprises mutation S458M. In some embodiments, the adenosine deaminase comprises mutation S458C. In some embodiments, the adenosine deaminase comprises mutation S458A. In some embodiments, the adenosine deaminase comprises mutation S458G. In some embodiments, the adenosine deaminase comprises mutation S458T. In some embodiments, the adenosine deaminase comprises mutation S458Y. In some embodiments, the adenosine deaminase comprises mutation S458W. In some embodiments, the adenosine deaminase comprises mutation S458Q. In some embodiments, the adenosine deaminase comprises mutation S458N. In some embodiments, the adenosine deaminase comprises mutation S458H. In some embodiments, the adenosine deaminase comprises mutation S458E. In some embodiments, the adenosine deaminase comprises mutation S458D. In some embodiments, the adenosine deaminase comprises mutation S458K. In some embodiments, the adenosine deaminase comprises mutation S458R. In some embodiments, the mutations at S458 described above are further made in combination with a E488Q mutation.

In some embodiments, the adenosine deaminase comprises a mutation at proline459 of the hADAR2-D amino acid sequence, or a corresponding position in a homologous ADAR protein. In some embodiments, the proline residue at position 459 is replaced by a cysteine residue (P459C). In some embodiments, the proline residue at position 459 is replaced by a histidine residue (P459H). In some embodiments, the proline residue at position 459 is replaced by a tryptophan residue (P459W).

[0421] In some embodiments, the adenosine deaminase comprises a mutation at histidine460 of the hADAR2-D amino acid sequence, or a corresponding position in a homologous ADAR protein. In some embodiments, the histidine residue at position 460 is replaced by an arginine residue (H460R). In some embodiments, the histidine residue at position 460 is replaced by an isoleucine residue (H460I). In some embodiments, the histidine residue at position 460 is replaced by a proline residue (H460P). In some embodiments, the adenosine deaminase comprises mutation H460L. In some embodiments, the adenosine deaminase comprises mutation H460V. In some embodiments, the adenosine deaminase comprises mutation H460F. In some embodiments, the adenosine deaminase comprises mutation H460M. In some embodiments, the adenosine deaminase comprises mutation H460C. In some embodiments, the adenosine deaminase comprises mutation H460A. In some embodiments, the adenosine deaminase comprises mutation H460G. In some embodiments, the adenosine deaminase comprises mutation H460T. In some embodiments, the adenosine deaminase comprises mutation H460S. In some embodiments, the adenosine deaminase comprises mutation H460Y. In some embodiments, the adenosine deaminase comprises mutation H460W. In some embodiments, the adenosine deaminase comprises mutation H460Q. In some embodiments, the adenosine deaminase comprises mutation H460N. In some embodiments, the adenosine deaminase comprises mutation H460E. In some embodiments, the adenosine deaminase comprises mutation H460D. In some embodiments, the adenosine deaminase comprises mutation H460K. In some embodiments, the mutations at H460 described above are further made in combination with a E488Q mutation.

[0422] In some embodiments, the adenosine deaminase comprises a mutation at proline462 of the hADAR2-D amino acid sequence, or a corresponding position in a homologous ADAR protein. In some embodiments, the proline residue at position 462 is replaced by a serine residue (P462S). In some embodiments, the proline residue at position 462 is replaced by a tryptophan residue (P462W). In some embodiments, the proline residue at position 462 is replaced by a glutamic acid residue (P462E).

[0423] In some embodiments, the adenosine deaminase comprises a mutation at aspartic acid469 of the hADAR2-D amino acid sequence, or a corresponding position in a homologous ADAR protein. In some embodiments, the aspartic acid residue at position 469 is replaced by a glutamine residue (D469Q). In some embodiments, the aspartic acid residue at position 469 is replaced by a serine residue (D469S). In some embodiments, the aspartic acid residue at position 469 is replaced by a tyrosine residue (D469Y).

[0424] In some embodiments, the adenosine deaminase comprises a mutation at arginine470 of the hADAR2-D amino acid sequence, or a corresponding position in a homologous ADAR protein. In some embodiments, the arginine residue at position 470 is replaced by an alanine residue (R470A). In some embodiments, the arginine residue at position 470 is replaced by an isoleucine residue (R470I). In some embodiments, the arginine residue at position 470 is replaced by an aspartic acid residue (R470D).

[0425] In some embodiments, the adenosine deaminase comprises a mutation at histidine471 of the hADAR2-D amino acid sequence, or a corresponding position in a homologous ADAR protein. In some embodiments, the histidine residue at position 471 is replaced by a lysine residue (H471K). In some embodiments, the histidine residue at position 471 is replaced by a threonine residue (H471T). In some embodiments, the histidine residue at position 471 is replaced by a valine residue (H471V).

[0426] In some embodiments, the adenosine deaminase comprises a mutation at proline472 of the hADAR2-D amino acid sequence, or a corresponding position in a homologous ADAR protein. In some embodiments, the proline residue at position 472 is replaced by a lysine residue (P472K). In some embodiments, the proline residue at position 472 is replaced by a threonine residue (P472T). In some embodiments, the proline residue at position 472 is replaced by an aspartic acid residue (P472D).

[0427] In some embodiments, the adenosine deaminase comprises a mutation at asparagine473 of the hADAR2-D amino acid sequence, or a corresponding position in a homologous ADAR protein. In some embodiments, the asparagine residue at position 473 is replaced by an arginine residue (N473R). In some embodiments, the asparagine residue at position 473 is replaced by a tryptophan residue (N473W). In some embodiments, the asparagine residue at position 473 is replaced by a proline residue (N473P). In some embodiments, the asparagine residue at position 473 is replaced by an aspartic acid residue (N473D).

[0428] In some embodiments, the adenosine deaminase comprises a mutation at arginine474 of the hADAR2-D amino acid sequence, or a corresponding position in a homologous ADAR protein. In some embodiments, the arginine residue at position 474 is replaced by a lysine residue (R474K). In some embodiments, the arginine residue at position 474 is replaced by a glycine residue (R474G). In some embodiments, the arginine residue at position 474 is replaced by an aspartic acid residue (R474D). In some embodiments, the arginine residue at position 474 is replaced by a glutamic acid residue (R474E).

[0429] In some embodiments, the adenosine deaminase comprises a mutation at lysine475 of the hADAR2-D amino acid sequence, or a corresponding position in a homologous ADAR protein. In some embodiments, the lysine residue at position 475 is replaced by a glutamine residue (K475Q). In some embodiments, the lysine residue at position 475 is replaced by an asparagine residue (K475N). In some embodiments, the lysine residue at position 475 is replaced by an aspartic acid residue (K475D).

[0430] In some embodiments, the adenosine deaminase comprises a mutation at alanine476 of the hADAR2-D amino acid sequence, or a corresponding position in a homologous ADAR protein. In some embodiments, the alanine residue at position 476 is replaced by a serine residue (A476S). In some embodiments, the alanine residue at position 476 is replaced by an arginine residue (A476R). In some embodiments, the alanine residue at position 476 is replaced by a glutamic acid residue (A476E).

[0431] In some embodiments, the adenosine deaminase comprises a mutation at arginine477 of the hADAR2-D amino acid sequence, or a corresponding position in a homologous ADAR protein. In some embodiments, the arginine residue at position 477 is replaced by a lysine residue (R477K). In some embodiments, the arginine residue at position 477 is replaced by a threonine residue (R477T). In some embodiments, the arginine residue at position 477 is replaced by a phenylalanine residue (R477F). In some embodiments, the arginine residue at position 474 is replaced by a glutamic acid residue (R477E).

[0432] In some embodiments, the adenosine deaminase comprises a mutation at glycine478 of the hADAR2-D amino acid sequence, or a corresponding position in a homologous ADAR protein. In some embodiments, the glycine residue at position 478 is replaced by an alanine residue (G478A). In some embodiments, the glycine residue at position 478 is replaced by an arginine residue (G478R). In some embodiments, the glycine residue at position 478 is replaced by a tyrosine residue (G478Y). In some embodiments, the adenosine deaminase comprises mutation G478I. In some embodiments, the adenosine deaminase comprises mutation G478L. In some embodiments, the adenosine deaminase comprises mutation G478V. In some embodiments, the adenosine deaminase comprises mutation G478F. In some embodiments, the adenosine deaminase comprises mutation G478M. In some embodiments, the adenosine deaminase comprises mutation G478C. In some embodiments, the adenosine deaminase comprises mutation G478P. In some embodiments, the adenosine deaminase comprises mutation G478T. In some embodiments, the adenosine deaminase comprises mutation G478S. In some embodiments, the adenosine deaminase comprises mutation G478W. In some embodiments, the adenosine deaminase comprises mutation G478Q. In some embodiments, the adenosine deaminase comprises mutation G478N. In some embodiments, the adenosine deaminase comprises mutation G478H. In some embodiments, the adenosine deaminase comprises mutation G478E. In some embodiments, the adenosine deaminase comprises mutation G478D. In some embodiments, the adenosine deaminase comprises mutation G478K. In some embodiments, the mutations at G478 described above are further made in combination with a E488Q mutation.

In some embodiments, the adenosine deaminase comprises a mutation at glutamine479 of the hADAR2-D amino acid sequence, or a corresponding position in a homologous ADAR protein. In some embodiments, the glutamine residue at position 479 is replaced by an asparagine residue (Q479N). In some embodiments, the glutamine residue at position 479 is replaced by a serine residue (Q479S). In some embodiments, the glutamine residue at position 479 is replaced by a proline residue (Q479P).

[0433] In some embodiments, the adenosine deaminase comprises a mutation at arginine348 of the hADAR2-D amino acid sequence, or a corresponding position in a homologous ADAR protein. In some embodiments, the arginine residue at position 348 is replaced by an alanine residue (R348A). In some embodiments, the arginine residue at position 348 is replaced by a glutamic acid residue (R348E).

[0434] In some embodiments, the adenosine deaminase comprises a mutation at valine351 of the hADAR2-D amino acid sequence, or a corresponding position in a homologous ADAR protein. In some embodiments, the valine residue at position 351 is replaced by a leucine residue (V351L). In some embodiments, the adenosine deaminase comprises mutation V351Y. In some embodiments, the adenosine deaminase comprises mutation V351M. In some embodiments, the adenosine deaminase comprises mutation V351T. In some embodiments, the adenosine deaminase comprises mutation V351G. In some embodiments, the adenosine deaminase comprises mutation V351A. In some embodiments, the adenosine deaminase comprises mutation V351F. In some embodiments, the adenosine deaminase comprises mutation V351E. In some embodiments, the adenosine deaminase comprises mutation V351I. In some embodiments, the adenosine deaminase comprises mutation V351C. In some embodiments, the adenosine deaminase comprises mutation V351H. In some embodiments, the adenosine deaminase comprises mutation V351P. In some embodiments, the adenosine deaminase comprises mutation V351S. In some embodiments, the adenosine deaminase comprises mutation V351K. In some embodiments, the adenosine deaminase comprises mutation V351N. In some embodiments, the adenosine deaminase comprises mutation V351W. In some embodiments, the adenosine deaminase comprises mutation V351Q. In some embodiments, the adenosine deaminase comprises mutation V351D. In some embodiments, the adenosine deaminase comprises mutation V351R. In some embodiments, the mutations at V351 described above are further made in combination with a E488Q mutation.

[0435] In some embodiments, the adenosine deaminase comprises a mutation at threonine375 of the hADAR2-D amino acid sequence, or a corresponding position in a homologous ADAR protein. In some embodiments, the threonine residue at position 375 is replaced by a glycine residue (T375G). In some embodiments, the threonine residue at position 375 is replaced by a serine residue (T375S). In some embodiments, the adenosine deaminase comprises mutation T375H. In some embodiments, the adenosine deaminase comprises mutation T375Q. In some embodiments, the adenosine deaminase comprises mutation T375C. In some embodiments, the adenosine deaminase comprises mutation T375N. In some embodiments, the adenosine deaminase comprises mutation T375M. In some embodiments, the adenosine deaminase comprises mutation T375A. In some embodiments, the adenosine deaminase comprises mutation T375W. In some embodiments, the adenosine deaminase comprises mutation T375V. In some embodiments, the adenosine deaminase comprises mutation T375R. In some embodiments, the adenosine deaminase comprises mutation T375E. In some embodiments, the adenosine deaminase comprises mutation T375K. In some embodiments, the adenosine deaminase comprises mutation T375F. In some embodiments, the adenosine deaminase comprises mutation T375I. In some embodiments, the adenosine deaminase comprises mutation T375D. In some embodiments, the adenosine deaminase comprises mutation T375P. In some embodiments, the adenosine deaminase comprises mutation T375L. In some embodiments, the adenosine deaminase comprises mutation T375Y. In some embodiments, the mutations at T375Y described above are further made in combination with an E488Q mutation.

[0436] In some embodiments, the adenosine deaminase comprises a mutation at arginine481 of the hADAR2-D amino acid sequence, or a corresponding position in a homologous ADAR protein. In some embodiments, the arginine residue at position 481 is replaced by a glutamic acid residue (R481E).

[0437] In some embodiments, the adenosine deaminase comprises a mutation at serine486 of the hADAR2-D amino acid sequence, or a corresponding position in a homologous ADAR protein. In some embodiments, the serine residue at position 486 is replaced by a threonine residue (S486T).

[0438] In some embodiments, the adenosine deaminase comprises a mutation at threonine490 of the hADAR2-D amino acid sequence, or a corresponding position in a homologous ADAR protein. In some embodiments, the threonine residue at position 490 is replaced by an alanine residue (T490A). In some embodiments, the threonine residue at position 490 is replaced by a serine residue (T490S).

[0439] In some embodiments, the adenosine deaminase comprises a mutation at serine495 of the hADAR2-D amino acid sequence, or a corresponding position in a homologous ADAR protein. In some embodiments, the serine residue at position 495 is replaced by a threonine residue (S495T).

[0440] In some embodiments, the adenosine deaminase comprises a mutation at arginine510 of the hADAR2-D amino acid sequence, or a corresponding position in a homologous ADAR protein. In some embodiments, the arginine residue at position 510 is replaced by a glutamine residue (R510Q). In some embodiments, the arginine residue at position 510 is replaced by an alanine residue (R510A). In some embodiments, the arginine residue at position 510 is replaced by a glutamic acid residue (R510E).

[0441] In some embodiments, the adenosine deaminase comprises a mutation at glycine593 of the hADAR2-D amino acid sequence, or a corresponding position in a homologous ADAR protein. In some embodiments, the glycine residue at position 593 is replaced by an alanine residue (G593A). In some embodiments, the glycine residue at position 593 is replaced by a glutamic acid residue (G593E).

[0442] In some embodiments, the adenosine deaminase comprises a mutation at lysine594 of the hADAR2-D amino acid sequence, or a corresponding position in a homologous ADAR protein. In some embodiments, the lysine residue at position 594 is replaced by an alanine residue (K594A).

[0443] In some embodiments, the adenosine deaminase comprises a mutation at any one or more of positions A454, R455, 1456, F457, S458, P459, H460, P462, D469, R470, H471, P472, N473, R474, K475, A476, R477, G478, Q479, R348, R510, G593, K594 of the hADAR2-D amino acid sequence, or a corresponding position in a homologous ADAR protein.

[0444] In some embodiments, the adenosine deaminase comprises any one or more of mutations A454S, A454C, A454D, R455A, R455V, R455H, I456V, I456L, I456D, F457Y, F457R, F457E, S458V, S458F, S458P, P459C, P459H, P459W, H460R, H460, H460P, P462S, P462W, P462E, D469Q, D469S, D469Y, R470A, R4701, R470D, H471K, H471T, H471V, P472K, P472T, P472D, N473R, N473W, N473P, R474K, R474G, R474D, K475Q, K475N, K475D, A476S, A476R, A476E, R477K, R477T, R477F, G478A, G478R, G478Y, Q479N, Q479S, Q479P, R348A, R510Q, R510A, G593A, G593E, K594A of the hADAR2-D amino acid sequence, or a corresponding position in a homologous ADAR protein.

[0445] In certain embodiments the adenosine deaminase is mutated to convert the activity to cytidine deaminase. Accordingly in some embodiments, the adenosine deaminase comprises one or more mutations in positions selected from E396, C451, V351, R455, T375, K376? S486, Q488, R510, K594, R348, G593, S397, H443, L444, Y445, F442, E438, T448, Δ353, V355, T339, P539, T339, P539, V525 1520, P462 and N579. In particular embodiments, the adenosine deaminase comprises one or more mutations in a position selected from V351, L444, V355, V525 and 1520. In some embodiments, the adenosine deaminase may comprises one or more of mutations at E488, V351, S486, T375, S370, P462, N597, based on amino acid sequence positions of hADAR2-D, and mutations in a homologous ADAR protein corresponding to the above.

[0446] In some embodiments, the adenosine deaminase may comprise one or more of the mutations: E488Q based on amino acid sequence positions of hADAR2-D, and mutations in a homologous ADAR protein corresponding to the above. In some embodiments, the adenosine deaminase may comprise one or more of the mutations: E488Q, V351G, based on amino acid sequence positions of hADAR2-D, and mutations in a homologous ADAR protein corresponding to the above. In some embodiments, the adenosine deaminase may comprise one or more of the mutations: E488Q, V351G, S486A, based on amino acid sequence positions of hADAR2-D, and mutations in a homologous ADAR protein corresponding to the above. In some embodiments, the adenosine deaminase may comprise one or more of the mutations: E488Q, V351G, S486A, T375S, based on amino acid sequence positions of hADAR2-D, and mutations in a homologous ADAR protein corresponding to the above. In some embodiments, the adenosine deaminase may comprise one or more of the mutations: E488Q, V351G, S486A, T375S, S370C, based on amino acid sequence positions of hADAR2-D, and mutations in a homologous ADAR protein corresponding to the above. In some embodiments, the adenosine deaminase may comprise one or more of the mutations: E488Q, V351G, S486A, T375S, S370C, P462A, based on amino acid sequence positions of hADAR2-D, and mutations in a homologous ADAR protein corresponding to the above. In some embodiments, the adenosine deaminase may comprise one or more of the mutations: E488Q, V351G, S486A, T375S, S370C, P462A, N597I, based on amino acid sequence positions of hADAR2-D, and mutations in a homologous ADAR protein corresponding to the above. In some embodiments, the adenosine deaminase may comprise one or more of the mutations: E488Q, V351G, S486A, T375S, S370C, P462A, N597I, L332I, based on amino acid sequence positions of hADAR2-D, and mutations in a homologous ADAR protein corresponding to the above. In some embodiments, the adenosine deaminase may comprise one or more of the mutations: E488Q, V351G, S486A, T375S, S370C, P462A, N597I, L332I, I398V, based on amino acid sequence positions of hADAR2-D, and mutations in a homologous ADAR protein corresponding to the above. In some embodiments, the adenosine deaminase may comprise one or more of the mutations: E488Q, V351G, S486A, T375S, S370C, P462A, N597I, L332I, I398V, K350I, based on amino acid sequence positions of hADAR2-D, and mutations in a homologous ADAR protein corresponding to the above.

[0447] In some embodiments, the adenosine deaminase comprises a mutation at any one or more of positions T375, V351, G478, S458, H460 of the hADAR2-D amino acid sequence, or a corresponding position in a homologous ADAR protein, optionally in combination a mutation at E488. In some embodiments, the adenosine deaminase comprises one or more of mutations selected from T375G, T375C, T375H, T375Q, V351M, V351T, V351Y, G478R, S458F, H460I, optionally in combination with E488Q.

[0448] In some embodiments, the adenosine deaminase comprises one or more of mutations selected from T375H, T375Q, V351M, V351Y, H460P, optionally in combination with E488Q.

[0449] In some embodiments, the adenosine deaminase comprises mutations T375S and S458F, optionally in combination with E488Q.

[0450] In some embodiments, the adenosine deaminase comprises a mutation at two or more of positions T375, N473, R474, G478, S458, P459, V351, R455, R455, T490, R348, Q479 of the hADAR2-D amino acid sequence, or a corresponding position in a homologous ADAR protein, optionally in combination a mutation at E488. In some embodiments, the adenosine deaminase comprises two or more of mutations selected from T375G, T375S, N473D, R474E, G478R, S458F, P459W, V351L, R455G, R455S, T490A, R348E, Q479P, optionally in combination with E488Q.

[0451] In some embodiments, the adenosine deaminase comprises mutations T375G and V351L. In some embodiments, the adenosine deaminase comprises mutations T375G and R455G. In some embodiments, the adenosine deaminase comprises mutations T375G and R455S. In some embodiments, the adenosine deaminase comprises mutations T375G and T490A. In some embodiments, the adenosine deaminase comprises mutations T375G and R348E. In some embodiments, the adenosine deaminase comprises mutations T375S and V351L. In some embodiments, the adenosine deaminase comprises mutations T375S and R455G. In some embodiments, the adenosine deaminase comprises mutations T375S and R455S. In some embodiments, the adenosine deaminase comprises mutations T375S and T490A. In some embodiments, the adenosine deaminase comprises mutations T375S and R348E. In some embodiments, the adenosine deaminase comprises mutations N473D and V351L. In some embodiments, the adenosine deaminase comprises mutations N473D and R455G. In some embodiments, the adenosine deaminase comprises mutations N473D and R455S. In some embodiments, the adenosine deaminase comprises mutations N473D and T490A. In some embodiments, the adenosine deaminase comprises mutations N473D and R348E. In some embodiments, the adenosine deaminase comprises mutations R474E and V351L. In some embodiments, the adenosine deaminase comprises mutations R474E and R455G. In some embodiments, the adenosine deaminase comprises mutations R474E and R455S. In some embodiments, the adenosine deaminase comprises mutations R474E and T490A. In some embodiments, the adenosine deaminase comprises mutations R474E and R348E. In some embodiments, the adenosine deaminase comprises mutations S458F and T375G. In some embodiments, the adenosine deaminase comprises mutations S458F and T375S. In some embodiments, the adenosine deaminase comprises mutations S458F and N473D. In some embodiments, the adenosine deaminase comprises mutations S458F and R474E. In some embodiments, the adenosine deaminase comprises mutations S458F and G478R. In some embodiments, the adenosine deaminase comprises mutations G478R and T375G. In some embodiments, the adenosine deaminase comprises mutations G478R and T375S. In some embodiments, the adenosine deaminase comprises mutations G478R and N473D. In some embodiments, the adenosine deaminase comprises mutations G478R and R474E. In some embodiments, the adenosine deaminase comprises mutations P459W and T375G. In some embodiments, the adenosine deaminase comprises mutations P459W and T375S. In some embodiments, the adenosine deaminase comprises mutations P459W and N473D. In some embodiments, the adenosine deaminase comprises mutations P459W and R474E. In some embodiments, the adenosine deaminase comprises mutations P459W and G478R. In some embodiments, the adenosine deaminase comprises mutations P459W and S458F. In some embodiments, the adenosine deaminase comprises mutations Q479P and T375G. In some embodiments, the adenosine deaminase comprises mutations Q479P and T375S. In some embodiments, the adenosine deaminase comprises mutations Q479P and N473D. In some embodiments, the adenosine deaminase comprises mutations Q479P and R474E. In some embodiments, the adenosine deaminase comprises mutations Q479P and G478R. In some embodiments, the adenosine deaminase comprises mutations Q479P and S458F. In some embodiments, the adenosine deaminase comprises mutations Q479P and P459W. All mutations described in this paragraph may also further be made in combination with a E488Q mutations.

[0452] In some embodiments, the adenosine deaminase comprises a mutation at any one or more of positions K475, Q479, P459, G478, S458 of the hADAR2-D amino acid sequence, or a corresponding position in a homologous ADAR protein, optionally in combination a mutation at E488. In some embodiments, the adenosine deaminase comprises one or more of mutations selected from K475N, Q479N, P459W, G478R, S458P, S458F, optionally in combination with E488Q.

[0453] In some embodiments, the adenosine deaminase comprises a mutation at any one or more of positions T375, V351, R455, H460, A476 of the hADAR2-D amino acid sequence, or a corresponding position in a homologous ADAR protein, optionally in combination a mutation at E488. In some embodiments, the adenosine deaminase comprises one or more of mutations selected from T375G, T375C, T375H, T375Q, V351M, V351T, V351Y, R455H, H460P, H460I, A476E, optionally in combination with E488Q.

[0454] In certain embodiments, improvement of editing and reduction of off-target modification is achieved by chemical modification of gRNAs. gRNAs which are chemically modified as exemplified in Vogel et al. (2014), Angew Chem Int Ed, 53:6267-6271, doi:10.1002/anie.201402634 (incorporated herein by reference in its entirety) reduce off-target activity and improve on-target efficiency. 2′-O-methyl and phosphothioate modified guide RNAs in general improve editing efficiency in cells.

[0455] ADAR has been known to demonstrate a preference for neighboring nucleotides on either side of the edited A (www.nature.com/nsmb/journal/v23/n5/full/nsmb.3203.html, Matthews et al. (2017), Nature Structural Mol Biol, 23(5): 426-433, incorporated herein by reference in its entirety). Accordingly, in certain embodiments, the gRNA, target, and/or ADAR is selected optimized for motif preference.

[0456] Intentional mismatches have been demonstrated in vitro to allow for editing of non-preferred motifs (https:/academic.oup.com/nar/article-lookup/doi/10.1093/nar/gku272; Schneider et al (2014), Nucleic Acid Res, 42(10):e87); Fukuda et al. (2017), Scienticic Reports, 7, doi:10.1038/srep41478, incorporated herein by reference in its entirety). Accordingly, in certain embodiments, to enhance RNA editing efficiency on non-preferred 5′ or 3′ neighboring bases, intentional mismatches in neighboring bases are introduced.

[0457] Results suggest that As opposite Cs in the targeting window of the ADAR deaminase domain are preferentially edited over other bases. Additionally, As base-paired with U's within a few bases of the targeted base show low levels of editing by Cas13b-ADAR fusions, suggesting that there is flexibility for the enzyme to edit multiple A's. See e.g. FIG. 18. These two observations suggest that multiple A's in the activity window of Cas13b-ADAR fusions could be specified for editing by mismatching all A's to be edited with C's. Accordingly, in certain embodiments, multiple A:C mismatches in the activity window are designed to create multiple A:I edits. In certain embodiments, to suppress potential off-target editing in the activity window, non-target As are paired with A's or G's.

[0458] The terms “editing specificity” and “editing preference” are used interchangeably herein to refer to the extent of A-to-I editing at a particular adenosine site in a double-stranded substrate. In some embodiment, the substrate editing preference is determined by the 5′ nearest neighbor and/or the 3′ nearest neighbor of the target adenosine residue. In some embodiments, the adenosine deaminase has preference for the 5′ nearest neighbor of the substrate ranked as U>A>C>G (“>” indicates greater preference). In some embodiments, the adenosine deaminase has preference for the 3′ nearest neighbor of the substrate ranked as G>C˜A>U (“>” indicates greater preference; “˜” indicates similar preference). In some embodiments, the adenosine deaminase has preference for the 3′ nearest neighbor of the substrate ranked as G>C>U˜A (“>” indicates greater preference; “˜” indicates similar preference). In some embodiments, the adenosine deaminase has preference for the 3′ nearest neighbor of the substrate ranked as G>C>A>U (“>” indicates greater preference). In some embodiments, the adenosine deaminase has preference for the 3′ nearest neighbor of the substrate ranked as C˜G˜A>U (“>” indicates greater preference; “˜” indicates similar preference). In some embodiments, the adenosine deaminase has preference for a triplet sequence containing the target adenosine residue ranked as TAG>AAG>CAC>AAT>GAA>GAC (“>” indicates greater preference), the center A being the target adenosine residue.

[0459] In some embodiments, the substrate editing preference of an adenosine deaminase is affected by the presence or absence of a nucleic acid binding domain in the adenosine deaminase protein. In some embodiments, to modify substrate editing preference, the deaminase domain is connected with a double-strand RNA binding domain (dsRBD) or a double-strand RNA binding motif (dsRBM). In some embodiments, the dsRBD or dsRBM may be derived from an ADAR protein, such as hADAR1 or hADAR2. In some embodiments, a full length ADAR protein that comprises at least one dsRBD and a deaminase domain is used. In some embodiments, the one or more dsRBM or dsRBD is at the N-terminus of the deaminase domain. In other embodiments, the one or more dsRBM or dsRBD is at the C-terminus of the deaminase domain.

[0460] In some embodiments, the substrate editing preference of an adenosine deaminase is affected by amino acid residues near or in the active center of the enzyme. In some embodiments, to modify substrate editing preference, the adenosine deaminase may comprise one or more of the mutations: G336D, G487R, G487K, G487W, G487Y, E488Q, E488N, T490A, V493A, V493T, V493S, N597K, N597R, A589V, S599T, N613K, N613R, based on amino acid sequence positions of hADAR2-D, and mutations in a homologous ADAR protein corresponding to the above.

[0461] Particularly, in some embodiments, to reduce editing specificity, the adenosine deaminase can comprise one or more of mutations E488Q, V493A, N597K, N613K, based on amino acid sequence positions of hADAR2-D, and mutations in a homologous ADAR protein corresponding to the above. In some embodiments, to increase editing specificity, the adenosine deaminase can comprise mutation T490A.

[0462] In some embodiments, to increase editing preference for target adenosine (A) with an immediate 5′ G, such as substrates comprising the triplet sequence GAC, the center A being the target adenosine residue, the adenosine deaminase can comprise one or more of mutations G336D, E488Q, E488N, V493T, V493S, V493A, A589V, N597K, N597R, S599T, N613K, N613R, based on amino acid sequence positions of hADAR2-D, and mutations in a homologous ADAR protein corresponding to the above.

[0463] Particularly, in some embodiments, the adenosine deaminase comprises mutation E488Q or a corresponding mutation in a homologous ADAR protein for editing substrates comprising the following triplet sequences: GAC, GAA, GAU, GAG, CAU, AAU, UAC, the center A being the target adenosine residue.

[0464] In some embodiments, the adenosine deaminase comprises the wild-type amino acid sequence of hADAR1-D as defined in SEQ ID No. 761. In some embodiments, the adenosine deaminase comprises one or more mutations in the hADAR1-D sequence, such that the editing efficiency, and/or substrate editing preference of hADAR1-D is changed according to specific needs.

[0465] In some embodiments, the adenosine deaminase comprises a mutation at Glycine1007 of the hADAR1-D amino acid sequence, or a corresponding position in a homologous ADAR protein. In some embodiments, the glycine residue at position 1007 is replaced by a non-polar amino acid residue with relatively small side chains. For example, in some embodiments, the glycine residue at position 1007 is replaced by an alanine residue (G1007A). In some embodiments, the glycine residue at position 1007 is replaced by a valine residue (G1007V). In some embodiments, the glycine residue at position 1007 is replaced by an amino acid residue with relatively large side chains. In some embodiments, the glycine residue at position 1007 is replaced by an arginine residue (G1007R). In some embodiments, the glycine residue at position 1007 is replaced by a lysine residue (G1007K). In some embodiments, the glycine residue at position 1007 is replaced by a tryptophan residue (G1007W). In some embodiments, the glycine residue at position 1007 is replaced by a tyrosine residue (G1007Y). Additionally, in other embodiments, the glycine residue at position 1007 is replaced by a leucine residue (G1007L). In other embodiments, the glycine residue at position 1007 is replaced by a threonine residue (G1007T). In other embodiments, the glycine residue at position 1007 is replaced by a serine residue (G1007S).

[0466] In some embodiments, the adenosine deaminase comprises a mutation at glutamic acid1008 of the hADAR1-D amino acid sequence, or a corresponding position in a homologous ADAR protein. In some embodiments, the glutamic acid residue at position 1008 is replaced by a polar amino acid residue having a relatively large side chain. In some embodiments, the glutamic acid residue at position 1008 is replaced by a glutamine residue (E1008Q). In some embodiments, the glutamic acid residue at position 1008 is replaced by a histidine residue (E1008H). In some embodiments, the glutamic acid residue at position 1008 is replaced by an arginine residue (E1008R). In some embodiments, the glutamic acid residue at position 1008 is replaced by a lysine residue (E1008K). In some embodiments, the glutamic acid residue at position 1008 is replaced by a nonpolar or small polar amino acid residue. In some embodiments, the glutamic acid residue at position 1008 is replaced by a phenylalanine residue (E1008F). In some embodiments, the glutamic acid residue at position 1008 is replaced by a tryptophan residue (E1008W). In some embodiments, the glutamic acid residue at position 1008 is replaced by a glycine residue (E1008G). In some embodiments, the glutamic acid residue at position 1008 is replaced by an isoleucine residue (E1008I). In some embodiments, the glutamic acid residue at position 1008 is replaced by a valine residue (E1008V). In some embodiments, the glutamic acid residue at position 1008 is replaced by a proline residue (E1008P). In some embodiments, the glutamic acid residue at position 1008 is replaced by a serine residue (E1008S). In other embodiments, the glutamic acid residue at position 1008 is replaced by an asparagine residue (E1008N). In other embodiments, the glutamic acid residue at position 1008 is replaced by an alanine residue (E1008A). In other embodiments, the glutamic acid residue at position 1008 is replaced by a Methionine residue (E1008M). In some embodiments, the glutamic acid residue at position 1008 is replaced by a leucine residue (E1008L).

[0467] In some embodiments, to improve editing efficiency, the adenosine deaminase may comprise one or more of the mutations: E1007S, E1007A, E1007V, E1008Q, E1008R, E1008H, E1008M, E1008N, E1008K, based on amino acid sequence positions of hADAR1-D, and mutations in a homologous ADAR protein corresponding to the above.

[0468] In some embodiments, to reduce editing efficiency, the adenosine deaminase may comprise one or more of the mutations: E1007R, E1007K, E1007Y, E1007L, E1007T, E1008G, E1008, E1008P, E1008V, E1008F, E1008W, E1008S, E1008N, E1008K, based on amino acid sequence positions of hADAR1-D, and mutations in a homologous ADAR protein corresponding to the above.

[0469] In some embodiments, the substrate editing preference, efficiency and/or selectivity of an adenosine deaminase is affected by amino acid residues near or in the active center of the enzyme. In some embodiments, the adenosine deaminase comprises a mutation at the glutamic acid 1008 position in hADAR1-D sequence, or a corresponding position in a homologous ADAR protein. In some embodiments, the mutation is E1008R, or a corresponding mutation in a homologous ADAR protein. In some embodiments, the E1008R mutant has an increased editing efficiency for target adenosine residue that has a mismatched G residue on the opposite strand.

[0470] In some embodiments, the adenosine deaminase protein further comprises or is connected to one or more double-stranded RNA (dsRNA) binding motifs (dsRBMs) or domains (dsRBDs) for recognizing and binding to double-stranded nucleic acid substrates. In some embodiments, the interaction between the adenosine deaminase and the double-stranded substrate is mediated by one or more additional protein factor(s), including a CRISPR/CAS protein factor. In some embodiments, the interaction between the adenosine deaminase and the double-stranded substrate is further mediated by one or more nucleic acid component(s), including a guide RNA.

[0471] In certain example embodiments, directed evolution may be used to design modified ADAR proteins capable of catalyzing additional reactions besides deamination of a adenine to a hypoxanthine.

### Modified Adenosine Deaminase Having C- to U Deamination Activity

[0472] In certain example embodiments, directed evolution may be used to design modified ADAR proteins capable of catalyzing additional reactions besides deamination of an adenine to a hypoxanthine. For example, the modified ADAR protein may be capable of catalyzing deamination of a cytidine to a uracil. While not bound by a particular theory, mutations that improve C to U activity may alter the shape of the binding pocket to be more amenable to the smaller cytidine base.

[0473] In some embodiments, the modified adenosine deaminase having C-to-U deamination activity comprises a mutation at any one or more of positions V351, T375, R455, and E488 of the hADAR2-D amino acid sequence, or a corresponding position in a homologous ADAR protein. In some embodiments, the adenosine deaminase comprises mutation E488Q. In some embodiments, the adenosine deaminase comprises one or more of mutations selected from V351I, V351L, V351F, V351M, V351C, V351A, V351G, V351P, V351T, V351S, V351Y, V351W, V351Q, V351N, V351H, V351E, V351D, V351K, V351R, T375I, T375L, T375V, T375F, T375M, T375C, T375A, T375G, T375P, T375S, T375Y, T375W, T375Q, T375N, T375H, T375E, T375D, T375K, T375R, R455I, R455L, R455V, R455F, R455M, R455C, R455A, R455G, R455P, R455T, R455S, R455Y, R455W, R455Q, R455N, R455H, R455E, R455D, R455K. In some embodiments, the adenosine deaminase comprises mutation E488Q, and further comprises one or more of mutations selected from V351I, V351L, V351F, V351M, V351C, V351A, V351G, V351P, V351T, V351S, V351Y, V351W, V351Q, V351N, V351H, V351E, V351D, V351K, V351R, T375I, T375L, T375V, T375F, T375M, T375C, T375A, T375G, T375P, T375S, T375Y, T375W, T375Q, T375N, T375H, T375E, T375D, T375K, T375R, R455I, R455L, R455V, R455F, R455M, R455C, R455A, R455G, R455P, R455T, R455S, R455Y, R455W, R455Q, R455N, R455H, R455E, R455D, R455K.

[0474] In connection with the aforementioned modified ADAR protein having C-to-U deamination activity, the invention described herein also relates to a method for deaminating a C in a target RNA sequence of interest, comprising delivering to a target RNA or DNA an AD-functoinalized composition disclosed herein.

[0475] In certain example embodiments, the method for deaminating a C in a target RNA sequencecomprising delivering to said target RNA: (a) a catalytically inactive (dead) Cas; (b) a guide molecule which comprises a guide sequence linked to a direct repeat sequence; and (c) a modified ADAR protein having C-to-U deamination activity or catalytic domain thereof; wherein said modified ADAR protein or catalytic domain thereof is covalently or non-covalently linked to said dead Cas protein or said guide molecule or is adapted to link thereto after delivery; wherein guide molecule forms a complex with said dead Cas protein and directs said complex to bind said target RNA sequence of interest; wherein said guide sequence is capable of hybridizing with a target sequence comprising said C to form an RNA duplex; wherein, optionally, said guide sequence comprises a non-pairing A or U at a position corresponding to said C resulting in a mismatch in the RNA duplex formed; and wherein said modified ADAR protein or catalytic domain thereof deaminates said C in said RNA duplex.

[0476] In connection with the aforementioned modified ADAR protein having C-to-U deamination activity, the invention described herein further relates to an engineered, non-naturally occurring system suitable for deaminating a C in a target locus of interest, comprising: (a) a guide molecule which comprises a guide sequence linked to a direct repeat sequence, or a nucleotide sequence encoding said guide molecule; (b) a catalytically inactive Cas13 protein, or a nucleotide sequence encoding said catalytically inactive Cas13 protein; (c) a modified ADAR protein having C-to-U deamination activity or catalytic domain thereof, or a nucleotide sequence encoding said modified ADAR protein or catalytic domain thereof; wherein said modified ADAR protein or catalytic domain thereof is covalently or non-covalently linked to said Cas13 protein or said guide molecule or is adapted to link thereto after delivery; wherein said guide sequence is capable of hybridizing with a target RNA sequence comprising a C to form an RNA duplex; wherein, optionally, said guide sequence comprises a non-pairing A or U at a position corresponding to said C resulting in a mismatch in the RNA duplex formed; wherein, optionally, the system is a vector system comprising one or more vectors comprising: (a) a first regulatory element operably linked to a nucleotide sequence encoding said guide molecule which comprises said guide sequence, (b) a second regulatory element operably linked to a nucleotide sequence encoding said catalytically inactive Cas13 protein; and (c) a nucleotide sequence encoding a modified ADAR protein having C-to-U deamination activity or catalytic domain thereof which is under control of said first or second regulatory element or operably linked to a third regulatory element; wherein, if said nucleotide sequence encoding a modified ADAR protein or catalytic domain thereof is operably linked to a third regulatory element, said modified ADAR protein or catalytic domain thereof is adapted to link to said guide molecule or said Cas13 protein after expression; wherein components (a), (b) and (c) are located on the same or different vectors of the system, optionally wherein said first, second, and/or third regulatory element is an inducible promoter.

[0477] According to the present invention, the substrate of the adenosine deaminase is an RNA/DNAn RNA duplex formed upon binding of the guide molecule to its DNA target which then forms the CRISPR-Cas complex with the CRISPR-Cas enzyme. The RNA/DNA or DNA/RNAn RNA duplex is also referred to herein as the “RNA/DNA hybrid”, “DNA/RNA hybrid” or “double-stranded substrate”. The particular features of the guide molecule and CRISPR-Cas enzyme are detailed below.

[0478] The term “editing selectivity” as used herein refers to the fraction of all sites on a double-stranded substrate that is edited by an adenosine deaminase. Without being bound by theory, it is contemplated that editing selectivity of an adenosine deaminase is affected by the double-stranded substrate's length and secondary structures, such as the presence of mismatched bases, bulges and/or internal loops.

[0479] In some embodiments, when the substrate is a perfectly base-paired duplex longer than 50 bp, the adenosine deaminase may be able to deaminate multiple adenosine residues within the duplex (e.g., 50% of all adenosine residues). In some embodiments, when the substrate is shorter than 50 bp, the editing selectivity of an adenosine deaminase is affected by the presence of a mismatch at the target adenosine site. Particularly, in some embodiments, adenosine (A) residue having a mismatched cytidine (C) residue on the opposite strand is deaminated with high efficiency. In some embodiments, adenosine (A) residue having a mismatched guanosine (G) residue on the opposite strand is skipped without editing.

### Cytidine Deaminase

[0480] The term “cytidine deaminase” or “cytidine deaminase protein” as used herein refers to a protein, a polypeptide, or one or more functional domain(s) of a protein or a polypeptide that is capable of catalyzing a hydrolytic deamination reaction that converts an cytosine (or an cytosine moiety of a molecule) to an uracil (or a uracil moiety of a molecule), as shown below. In some embodiments, the cytosine-containing molecule is an cytidine (C), and the uracil-containing molecule is an uridine (U). The cytosine-containing molecule can be deoxyribonucleic acid (DNA) or ribonucleic acid (RNA).

[chemical structure]

[0481] According to the present disclosure, cytidine deaminases that can be used in connection with the present disclosure include, but are not limited to, members of the enzyme family known as apolipoprotein B mRNA-editing complex (APOBEC) family deaminase, an activation-induced deaminase (AID), or a cytidine deaminase 1 (CDA1). In particular embodiments, the deaminase in an APOBEC1 deaminase, an APOBEC2 deaminase, an APOBEC3A deaminase, an APOBEC3B deaminase, an APOBEC3C deaminase, and APOBEC3D deaminase, an APOBEC3E deaminase, an APOBEC3F deaminase an APOBEC3G deaminase, an APOBEC3H deaminase, or an APOBEC4 deaminase.

[0482] In the methods and systems of the present invention, the cytidine deaminase is capable of targeting Cytosine in a DNA single strand. In certain example embodiments the cytodine deaminase may edit on a single strand present outside of the binding component e.g. bound Cas13. In other example embodiments, the cytodine deaminase may edit at a localized bubble, such as a localized bubble formed by a mismatch at the target edit site but the guide sequence. In certain example embodiments the cytodine deaminase may contain mutations that help focus the are of activity such as those disclosed in Kim et al., Nature Biotechnology (2017) 35(4):371-377 (doi:10.1038/nbt.3803.

[0483] In some embodiments, the cytidine deaminase is derived from one or more metazoa species, including but not limited to, mammals, birds, frogs, squids, fish, flies and worms. In some embodiments, the cytidine deaminase is a human, primate, cow, dog rat or mouse cytidine deaminase.

[0484] In some embodiments, the cytidine deaminase is a human APOBEC, including hAPOBEC1 or hAPOBEC3. In some embodiments, the cytidine deaminase is a human AID.

[0485] In some embodiments, the cytidine deaminase protein recognizes and converts one or more target cytosine residue(s) in a single-stranded bubble of a RNA duplex into uracil residues (s). In some embodiments, the cytidine deaminase protein recognizes a binding window on the single-stranded bubble of a RNA duplex. In some embodiments, the binding window contains at least one target cytosine residue(s). In some embodiments, the binding window is in the range of about 3 bp to about 100 bp. In some embodiments, the binding window is in the range of about 5 bp to about 50 bp. In some embodiments, the binding window is in the range of about 10 bp to about 30 bp. In some embodiments, the binding window is about 1 bp, 2 bp, 3 bp, 5 bp, 7 bp, 10 bp, 15 bp, 20 bp, 25 bp, 30 bp, 40 bp, 45 bp, 50 bp, 55 bp, 60 bp, 65 bp, 70 bp, 75 bp, 80 bp, 85 bp, 90 bp, 95 bp, or 100 bp.

[0486] In some embodiments, the cytidine deaminase protein comprises one or more deaminase domains. Not intended to be bound by theory, it is contemplated that the deaminase domain functions to recognize and convert one or more target cytosine (C) residue(s) contained in a single-stranded bubble of a RNA duplex into (an) uracil (U) residue (s). In some embodiments, the deaminase domain comprises an active center. In some embodiments, the active center comprises a zinc ion. In some embodiments, amino acid residues in or near the active center interact with one or more nucleotide(s) 5′ to a target cytosine residue. In some embodiments, amino acid residues in or near the active center interact with one or more nucleotide(s) 3′ to a target cytosine residue.

[0487] In some embodiments, the cytidine deaminase comprises human APOBEC1 full protein (hAPOBEC1) or the deaminase domain thereof (hAPOBEC1-D) or a C-terminally truncated version thereof (hAPOBEC-T). In some embodiments, the cytidine deaminase is an APOBEC family member that is homologous to hAPOBEC1, hAPOBEC-D or hAPOBEC-T. In some embodiments, the cytidine deaminase comprises human AID1 full protein (hAID) or the deaminase domain thereof (hAID-D) or a C-terminally truncated version thereof (hAID-T). In some embodiments, the cytidine deaminase is an AID family member that is homologous to hAID, hAID-D or hAID-T. In some embodiments, the hAID-T is a hAID which is C-terminally truncated by about 20 amino acids.

[0488] In some embodiments, the cytidine deaminase comprises the wild-type amino acid sequence of a cytosine deaminase. In some embodiments, the cytidine deaminase comprises one or more mutations in the cytosine deaminase sequence, such that the editing efficiency, and/or substrate editing preference of the cytosine deaminase is changed according to specific needs.

[0489] Certain mutations of APOBEC1 and APOBEC3 proteins have been described in Kim et al., Nature Biotechnology (2017) 35(4):371-377 (doi:10.1038/nbt.3803); and Harris et al. Mol. Cell (2002) 10:1247-1253, each of which is incorporated herein by reference in its entirety.

[0490] In some embodiments, the cytidine deaminase is an APOBEC1 deaminase comprising one or more mutations at amino acid positions corresponding to W90, R118, H121, H122, R126, or R132 in rat APOBEC1, or an APOBEC3G deaminase comprising one or more mutations at amino acid positions corresponding to W285, R313, D316, D317X, R320, or R326 in human APOBEC3G.

[0491] In some embodiments, the cytidine deaminase comprises a mutation at tryptophane90 of the rat APOBEC1 amino acid sequence, or a corresponding position in a homologous APOBEC protein, such as tryptophane285 of APOBEC3G. In some embodiments, the tryptophane residue at position 90 is replaced by an tyrosine or phenylalanine residue (W90Y or W90F).

[0492] In some embodiments, the cytidine deaminase comprises a mutation at Arginine118 of the rat APOBEC1 amino acid sequence, or a corresponding position in a homologous APOBEC protein. In some embodiments, the arginine residue at position 118 is replaced by an alanine residue (R118A).

[0493] In some embodiments, the cytidine deaminase comprises a mutation at Histidine121 of the rat APOBEC1 amino acid sequence, or a corresponding position in a homologous APOBEC protein. In some embodiments, the histidine residue at position 121 is replaced by an arginine residue (H121R).

[0494] In some embodiments, the cytidine deaminase comprises a mutation at Histidine122 of the rat APOBEC1 amino acid sequence, or a corresponding position in a homologous APOBEC protein. In some embodiments, the histidine residue at position 122 is replaced by an arginine residue (H122R).

[0495] In some embodiments, the cytidine deaminase comprises a mutation at Arginine126 of the rat APOBEC1 amino acid sequence, or a corresponding position in a homologous APOBEC protein, such as Arginine320 of APOBEC3G. In some embodiments, the arginine residue at position 126 is replaced by an alanine residue (R126A) or by a glutamic acid (R126E).

[0496] In some embodiments, the cytidine deaminase comprises a mutation at arginine132 of the APOBEC1 amino acid sequence, or a corresponding position in a homologous APOBEC protein. In some embodiments, the arginine residue at position 132 is replaced by a glutamic acid residue (R132E).

[0497] In some embodiments, to narrow the width of the editing window, the cytidine deaminase may comprise one or more of the mutations: W90Y, W90F, R126E and R132E, based on amino acid sequence positions of rat APOBEC1, and mutations in a homologous APOBEC protein corresponding to the above.

[0498] In some embodiments, to reduce editing efficiency, the cytidine deaminase may comprise one or more of the mutations: W90A, R118A, R132E, based on amino acid sequence positions of rat APOBEC1, and mutations in a homologous APOBEC protein corresponding to the above. In particular embodiments, it can be of interest to use a cytidine deaminase enzyme with reduced efficiency to reduce off-target effects.

[0499] In some embodiments, the cytidine deaminase is wild-type rat APOBEC1 (rAPOBEC1, or a catalytic domain thereof. In some embodiments, the cytidine deaminase comprises one or more mutations in the rAPOBEC1 sequence, such that the editing efficiency, and/or substrate editing preference of rAPOBEC1 is changed according to specific needs.

rAPOBEC1:
(SEQ ID NO: 42)
[sequence omitted]

[0500] In some embodiments, the cytidine deaminase is wild-type human APOBEC1 (hAPOBEC1) or a catalytic domain thereof. In some embodiments, the cytidine deaminase comprises one or more mutations in the hAPOBEC1 sequence, such that the editing efficiency, and/or substrate editing preference of hAPOBEC1 is changed according to specific needs.

APOBEC1:
(SEQ ID NO: 43)
MTSEKGPSTGDPTLRRRIEPWEFDVFYDPRELRKEACLLYEIKWGMSRKI
WRSSGKNTTNHVEVNFIKKFTSERDFHPSMSCSITWFLSWSPCWECSQAI
REFLSRHPGVTLVIYVARLFWHMDQQNRQGLRDLVNSGVTIQIMRASEYY
HCWRNFVNYPPGDEAHWPQYPPLWMMLYALELHCIILSLPPCLKISRRWQ
NHLTFFRLHLQNCHYQTIPPHILLATGLIHPSVAWR

[0501] In some embodiments, the cytidine deaminase is wild-type human APOBEC3G (hAPOBEC3G) or a catalytic domain thereof. In some embodiments, the cytidine deaminase comprises one or more mutations in the hAPOBEC3G sequence, such that the editing efficiency, and/or substrate editing preference of hAPOBEC3G is changed according to specific needs.

hAPOBEC3G:
(SEQ ID NO: 44)
MELKYHPEMRFFHWFSKWRKLHRDQEYEVTWYISWSPCTKCTRDMATFLA
EDPKVTLTIFVARLYYFWDPDYQEALRSLCQKRDGPRATMKIMNYDEFQH
CWSKFVYSQRELEEPWNNLPKYYILLHIMLGEILRHSMDPPTFTFNFNNE
PWVRGRHETYLCYEVERMHNDTWVLLNQRRGFLCNQAPHKHGFLEGRHAE
LCFLDVIPFWKLDLDQDYRVTCFTSWSPCFSCAQEMAKFISKNKHVSLCI
FTARIYDDQGRCQEGLRTLAEAGAKISIMTYSEFKHCWDTFVDHQGCPFQ
PWDGLDEHSQDLSGRLRAILQNQEN

[0502] In some embodiments, the cytidine deaminase is wild-type Petromyzon marinus CDA1 (pmCDA1) or a catalytic domain thereof. In some embodiments, the cytidine deaminase comprises one or more mutations in the pmCDA1 sequence, such that the editing efficiency, and/or substrate editing preference of pmCDA1 is changed according to specific needs.

pmCDAl:
(SEQ ID NO: 45)
MTDAEYVRIHEKLDIYTFKKQFFNNKKSVSHRCYVLFELKRRGERRACFW
GYAVNKPQSGTERGIHAEIFSIRKVEEYLRDNPGQFTINWYSSWSPCADC
AEKILEWYNQELRGNGHTLKIWACKLYYEKNARNQIGLWNLRDNGVGLNV
MVSEHYQCCRKIFIQSSHNQLNENRWLEKTLKRAEKRRSELSIMIQVKIL
HTTKSPAV

[0503] In some embodiments, the cytidine deaminase is wild-type human AID (hAID) or a catalytic domain thereof. In some embodiments, the cytidine deaminase comprises one or more mutations in the pmCDA1 sequence, such that the editing efficiency, and/or substrate editing preference of pmCDA1 is changed according to specific needs.

hAID:
(SEQ ID NO: 46)
MDSLLMNRRKFLYQFKNVRWAKGRRETYLCYVVKRRDSATSFSLDFGYLR
NKNGCHVELLFLRYISDWDLDPGRCYRVTWFTSWSPCYDCARHVADFLRG
NPYLSLRIFTARLYFCEDRKAEPEGLRRLHRAGVQIAIMTFKDYFYCWNT
FVENHERTFKAWEGLHENSVRLSRQLRRILLPLYEVDDLRDAFRTLGLLD

[0504] In some embodiments, the cytidine deaminase is truncated version of hAID (hAID-DC) or a catalytic domain thereof. In some embodiments, the cytidine deaminase comprises one or more mutations in the hAID-DC sequence, such that the editing efficiency, and/or substrate editing preference of hAID-DC is changed according to specific needs.

hAID-DC:
(SEQ ID NO: 47)
MDSLLMNRRKFLYQFKNVRWAKGRRETYLCYVVKRRDSATSFSLDFGYLR
NKNGCHVELLFLRYISDWDLDPGRCYRVTWFTSWSPCYDCARHVADFLRG
NPNLSLRIFTARLYFCEDRKAEPEGLRRLHRAGVQIAIMTFKDYFYCWNT
FVENHERTFKAWEGLHENSVRLSRQLRRILL

[0505] Additional embodiments of the cytidine deaminase are disclosed in WO WO2017/070632, titled “Nucleobase Editor and Uses Thereof,” which is incorporated herein by reference in its entirety.

[0506] In some embodiments, the cytidine deaminase has an efficient deamination window that encloses the nucleotides susceptible to deamination editing. Accordingly, in some embodiments, the “editing window width” refers to the number of nucleotide positions at a given target site for which editing efficiency of the cytidine deaminase exceeds the half-maximal value for that target site. In some embodiments, the cytidine deaminase has an editing window width in the range of about 1 to about 6 nucleotides. In some embodiments, the editing window width of the cytidine deaminase is 1, 2, 3, 4, 5, or 6 nucleotides.

[0507] Not intended to be bound by theory, it is contemplated that in some embodiments, the length of the linker sequence affects the editing window width. In some embodiments, the editing window width increases (e.g., from about 3 to about 6 nucleotides) as the linker length extends (e.g., from about 3 to about 21 amino acids). In a non-limiting example, a 16-residue linker offers an efficient deamination window of about 5 nucleotides. In some embodiments, the length of the guide RNA affects the editing window width. In some embodiments, shortening the guide RNA leads to a narrowed efficient deamination window of the cytidine deaminase.

[0508] In some embodiments, mutations to the cytidine deaminase affect the editing window width. In some embodiments, the cytidine deaminase component of the CD-functionalized CRISPR system comprises one or more mutations that reduce the catalytic efficiency of the cytidine deaminase, such that the deaminase is prevented from deamination of multiple cytidines per DNA binding event. In some embodiments, tryptophan at residue 90 (W90) of APOBEC1 or a corresponding tryptophan residue in a homologous sequence is mutated. In some embodiments, the catalytically inactive Cas13 is fused to or linked to an APOBEC1 mutant that comprises a W90Y or W90F mutation. In some embodiments, tryptophan at residue 285 (W285) of APOBEC3G, or a corresponding tryptophan residue in a homologous sequence is mutated. In some embodiments, the catalytically inactive Cas13 is fused to or linked to an APOBEC3G mutant that comprises a W285Y or W285F mutation.

[0509] In some embodiments, the cytidine deaminase component of CD-functionalized CRISPR system comprises one or more mutations that reduce tolerance for non-optimal presentation of a cytidine to the deaminase active site. In some embodiments, the cytidine deaminase comprises one or more mutations that alter substrate binding activity of the deaminase active site. In some embodiments, the cytidine deaminase comprises one or more mutations that alter the conformation of DNA to be recognized and bound by the deaminase active site. In some embodiments, the cytidine deaminase comprises one or more mutations that alter the substrate accessibility to the deaminase active site. In some embodiments, arginine at residue 126 (R126) of APOBEC1 or a corresponding arginine residue in a homologous sequence is mutated. In some embodiments, the catalytically inactive Cas13 is fused to or linked to an APOBEC1 that comprises a R126A or R126E mutation. In some embodiments, tryptophan at residue 320 (R320) of APOBEC3G, or a corresponding arginine residue in a homologous sequence is mutated. In some embodiments, the catalytically inactive Cas13 is fused to or linked to an APOBEC3G mutant that comprises a R320A or R320E mutation. In some embodiments, arginine at residue 132 (R132) of APOBEC1 or a corresponding arginine residue in a homologous sequence is mutated. In some embodiments, the catalytically inactive Cas13 is fused to or linked to an APOBEC1 mutant that comprises a R132E mutation.

[0510] In some embodiments, the APOBEC1 domain of the CD-functionalized CRISPR system comprises one, two, or three mutations selected from W90Y, W90F, R126A, R126E, and R132E. In some embodiments, the APOBEC1 domain comprises double mutations of W90Y and R126E. In some embodiments, the APOBEC1 domain comprises double mutations of W90Y and R132E. In some embodiments, the APOBEC1 domain comprises double mutations of R126E and R132E. In some embodiments, the APOBEC1 domain comprises three mutations of W90Y, R126E and R132E.

[0511] In some embodiments, one or more mutations in the cytidine deaminase as disclosed herein reduce the editing window width to about 2 nucleotides. In some embodiments, one or more mutations in the cytidine deaminase as disclosed herein reduce the editing window width to about 1 nucleotide. In some embodiments, one or more mutations in the cytidine deaminase as disclosed herein reduce the editing window width while only minimally or modestly affecting the editing efficiency of the enzyme. In some embodiments, one or more mutations in the cytidine deaminase as disclosed herein reduce the editing window width without reducing the editing efficiency of the enzyme. In some embodiments, one or more mutations in the cytidine deaminase as disclosed herein enable discrimination of neighboring cytidine nucleotides, which would be otherwise edited with similar efficiency by the cytidine deaminase.

[0512] In some embodiments, the cytidine deaminase protein further comprises or is connected to one or more double-stranded RNA (dsRNA) binding motifs (dsRBMs) or domains (dsRBDs) for recognizing and binding to double-stranded nucleic acid substrates. In some embodiments, the interaction between the cytidine deaminase and the substrate is mediated by one or more additional protein factor(s), including a CRISPR/CAS protein factor. In some embodiments, the interaction between the cytidine deaminase and the substrate is further mediated by one or more nucleic acid component(s), including a guide RNA.

[0513] According to the present invention, the substrate of the cytidine deaminase is an DNA single strand bubble of a RNA duplex comprising a Cytosine of interest, made accessible to the cytidine deaminase upon binding of the guide molecule to its DNA target which then forms the CRISPR-Cas complex with the CRISPR-Cas enzyme, whereby the cytosine deaminase is fused to or is capable of binding to one or more components of the CRISPR-Cas complex, i.e. the CRISPR-Cas enzyme and/or the guide molecule. The particular features of the guide molecule and CRISPR-Cas enzyme are detailed below.

[0514] The cytidine deaminase or catalytic domain thereof may be a human, a rat, or a lamprey cytidine deaminase protein or catalytic domain thereof.

[0515] The cytidine deaminase protein or catalytic domain thereof may be an apolipoprotein B mRNA-editing complex (APOBEC) family deaminase. The cytidine deaminase protein or catalytic domain thereof may be an activation-induced deaminase (AID). The cytidine deaminase protein or catalytic domain thereof may be a cytidine deaminase 1 (CDA1).

[0516] The cytidine deaminase protein or catalytic domain thereof may be an APOBEC1 deaminase. The APOBEC1 deaminase may comprise one or more mutations corresponding to W90A, W90Y, R118A, H121R, H122R, R126A, R126E, or R132E in rat APOBEC1, or an APOBEC3G deaminase comprising one or more mutations corresponding to W285A, W285Y, R313A, D316R, D317R, R320A, R320E, or R326E in human APOBEC3G.

[0517] The system may further comprise a uracil glycosylase inhibitor (UGI). Inn some embodiments, the cytidine deaminase protein or catalytic domain thereof is delivered together with a uracil glycosylase inhibitor (UGI). The GI may be linked (e.g., covalently linked) to the cytidine deaminase protein or catalytic domain thereof and/or a catalytically inactive Cas13 protein.

### Base Excision Repair Inhibitor

[0518] In some embodiments, the system (e.g., AD-functionalized CRISPR system) further comprises a base excision repair (BER) inhibitor. In some cases, the system comprise a nucleotide sequence encoding the BER inhibitor. Without wishing to be bound by any particular theory, cellular DNA-repair response to the presence of I:T pairing may be responsible for a decrease in nucleobase editing efficiency in cells. Alkyladenine DNA glycosylase (also known as DNA-3-methyladenine glycosylase, 3-alkyladenine DNA glycosylase, or N-methylpurine DNA glycosylase) catalyzes removal of hypoxanthine from DNA in cells, which may initiate base excision repair, with reversion of the I:T pair to a A:T pair as outcome.

[0519] In some embodiments, the BER inhibitor is an inhibitor of alkyladenine DNA glycosylase. In some embodiments, the BER inhibitor is an inhibitor of human alkyladenine DNA glycosylase. In some embodiments, the BER inhibitor is a polypeptide inhibitor. In some embodiments, the BER inhibitor is a protein that binds hypoxanthine. In some embodiments, the BER inhibitor is a protein that binds hypoxanthine in DNA. In some embodiments, the BER inhibitor is a catalytically inactive alkyladenine DNA glycosylase protein or binding domain thereof. In some embodiments, the BER inhibitor is a catalytically inactive alkyladenine DNA glycosylase protein or binding domain thereof that does not excise hypoxanthine from the DNA. Other proteins that are capable of inhibiting (e.g., sterically blocking) an alkyladenine DNA glycosylase base-excision repair enzyme are within the scope of this disclosure. Additionally, any proteins that block or inhibit base-excision repair as also within the scope of this disclosure.

[0520] Without wishing to be bound by any particular theory, base excision repair may be inhibited by molecules that bind the edited strand, block the edited base, inhibit alkyladenine DNA glycosylase, inhibit base excision repair, protect the edited base, and/or promote fixing of the non-edited strand. It is believed that the use of the BER inhibitor described herein can increase the editing efficiency of an adenosine deaminase that is capable of catalyzing a A to I change.

[0521] Accordingly, in the first design of the AD-functionalized CRISPR system discussed above, the CRISPR-Cas protein or the adenosine deaminase can be fused to or linked to a BER inhibitor (e.g., an inhibitor of alkyladenine DNA glycosylase). In some embodiments, the BER inhibitor can be comprised in one of the following structures (nCas13=Cas13 nickase; dCas13=dead Cas13); [AD]-[optional linker]-[nCas13/dCas13]-[optional linker]-[BER inhibitor]; [AD]-[optional linker]-[BER inhibitor]-[optional linker]-[nCas13/dCas13]; [BER inhibitor]-[optional linker]-[AD]-[optional linker]-[nCas13/dCas13]; [BER inhibitor]-[optional linker]-[nCas13/dCas13]-[optional linker]-[AD]; [nCas13/dCas13]-[optional linker]-[AD]-[optional linker]-[BER inhibitor]; [nCas13/dCas13]-[optionallinker]-[BERinhibitor]-[optionallinker]-[AD].

[0522] Similarly, in the second design of the AD-functionalized CRISPR system discussed above, the CRISPR-Cas protein, the adenosine deaminase, or the adaptor protein can be fused to or linked to a BER inhibitor (e.g., an inhibitor of alkyladenine DNA glycosylase). In some embodiments, the BER inhibitor can be comprised in one of the following structures (nCas13=Cas13 nickase; dCas13=dead Cas13): [nCas13/dCas13]-[optional linker]-[BER inhibitor]; [BER inhibitor]-[optional linker]-[nCas13/dCas13]; [AD]-[optional linker]-[Adaptor]-[optional linker]-[BER inhibitor]; [AD]-[optional linker]-[BER inhibitor]-[optional linker]-[Adaptor]; [BER inhibitor]-[optional linker]-[AD]-[optional linker]-[Adaptor]; [BER inhibitor]-[optional linker]-[Adaptor]-[optional linker]-[AD]; [Adaptor]-[optional linker]-[AD]-[optional linker]-[BER inhibitor]; [Adaptor]-[optional linker]-[BER inhibitor]-[optional linker]-[AD].

[0523] In the third design of the AD-functionalized CRISPR system discussed above, the BER inhibitor can be inserted into an internal loop or unstructured region of a CRISPR-Cas protein.

### Links Between Nucleotide Deaminase and Other Components in the System

[0524] In some embodiments, the nucleotide deaminase protein or catalytic domain thereof may be linked to the Cas protein (e.g., dead Cas protein such as dead Cas13), and/or the guide molecule. In some cases, the nucleotide deaminase protein or catalytic domain thereof may be adapted to link to the Cas protein and/or the guide molecule after delivered to the target sequence. In certain cases, the link may be covalent. In certain cases, the link may be non-covalent.

[0525] In one aspect the present invention provides methods for targeted deamination of adenine in RNA, more particularly in an RNA sequence of interest. According to the methods of the invention, the nucleotide deaminase protein is recruited specifically to the relevant Adenine in the RNA sequence of interest by a the RNA-binding component which can specifically bind to a target sequence. In order to achieve this, the nucleotide deaminase protein can either be covalently linked to the CRISPR-Cas enzyme or be provided as a separate protein, but adapted so as to ensure recruitment thereof to the CRISPR-Cas complex.

### RNA-Binding Protein

[0526] In certain example embodiments, the nucleotide deaminase protein is recruited to the target loci of interest by fusion or linkage to a RNA-binding protein or RNA-binding functional domain thereof. The RNA-binding protein may bind a sequence, motif, or structural feature of the at or adjacent to the target locus. A structural feature may include hairpins, tetraloops, or other secondary structural features of a nucleic acid. As used herein “adjacent” means within a distance and/or orientation of the target locus in which the nucleotide deaminase can complete its base editing function. In certain example embodiments, the RNA-binding protein or functional domain thereof may bind a sequence, motif, or structural sequence of a guide molecule. The guide molecule comprises a sequence that hybridizes to the target loci of interest and thereby directs the nucleotide deaminase to the target loci.

[0527] In certain example embodiments, the RNA-binding protein or functional domain thereof comprises a RNA recognition motif Example RNA-binding proteins comprising a RNA recognition motif include, but are not limited to, A2BP1; ACF; BOLL; BRUNOL4; BRUNOL5; BRUNOL6; CCBL2; CGI96; CIRBP; CNOT 4; CPEB2; CPEB3; CPEB4; CPSF7; CSTF2; CSTF2T; CUGBP1; CUGBP2; D10S102; DAZ 1; DAZ2; DAZ3; DAZ4; DAZAP1; DAZL; DNAJC17; DND1; EIF3S4; EIF3S9; EIF4B; EI F4H; ELAVL1; ELAVL2; ELAVL3; ELAVL4; ENOX1; ENOX2; EWSR1; FUS; FUSIP1; G3BP; G3BP1; G3BP2; GRSF1; HNRNPL; HNRPA0; HNRPA1; HNRPA2B1; HNRPA3; H NRPAB; HNRPC; HNRPCL1; HNRPD; HNRPDL; HNRPF; HNRPH1; HNRPH2; HNRPH 3; HNRPL; HNRPLL; HNRPM; HNRPR; HRNBP1; HSU53209; HTATSF1; IGF2BP1; IGF 2BP2; IGF2BP3; LARP7; MKI67IP; MSI1; MSI2; MSSP2; MTHFSD; MYEF2; NCBP2; N CL; NOL8; NONO; P14; PABPC1; PABPC1L; PABPC3; PABPC4; PABPC5; PABPN1; PO LDIP3; PPARGC1; PPARGC1A; PPARGC1B; PPIE; PPIL4; PPRC1; PSPC1; PTBP1; PTB P2; PUF60; RALY; RALYL; RAVER1; RAVER2; RBM10; RBM11; RBM12; RBM12B; R BM14; RBM15; RBM15B; RBM16; RBM17; RBM18; RBM19; RBM22; RBM23; RBM24; RBM25; RBM26; RBM27; RBM28; RBM3; RBM32B; RBM33; RBM34; RBM35A; RBM3 5B; RBM38; RBM39; RBM4; RBM41; RBM42; RBM44; RBM45; RBM46; RBM47; RBM 4B; RBM5; RBM7; RBM8A; RBM9; RBMS1; RBMS2; RBMS3; RBMX; RBMX2; RBMX L2; RBMY1A1; RBMY1B; RBMY1E; RBMYlF; RBMY2FP; RBPMS; RBPMS2; RDBP; RNPC3; RNPC4; RNPS1; ROD1; SAFB; SAFB2; SART3; SETD1A; SF3B14; SF3B4; SFP Q; SFRS1; SFRS10; SFRS11; SFRS12; SFRS15; SFRS2; SFRS2B; SFRS3; SFRS4; SFRS5; SFRS6; SFRS7; SFRS9; SLIRP; SLTM; SNRP70; SNRPA; SNRPB2; SPEN; SR140; SRRP 35; SSB; SYNCRIP; TAF15; TARDBP; THOC4; TIAl; TIAL1; TNRC4; TNRC6C; TRA2A; TRSPAP1; TUT1; U1SNRNPBP; U2AF1; U2AF2; UHMK1; ZCRB1; ZNF638; ZRSR1; an d ZRSR2.

[0528] In certain example embodiments, the RNA-binding protein or function domain thereof may comprise a K homology domain. Example RNA-binding proteins comprising a K homology domain include, but are not limited to, AKAP1; ANKHD1; ANKRD17; ASCC1; BICC1; DDX43; DDX53; DPPA5; FMR1; FUBP 1; FUBP3; FXR1; FXR2; GLD1; HDLBP; HNRPK; IGF2BP1; IGF2BP2; IGF2BP3; KHDR BS1; KHDRBS2; KHDRBS3; KHSRP; KRR1; MEX3A; MEX3B; MEX3C; MEX3D; NOV A1; NOVA2; PCBP1; PCBP2; PCBP3; PCBP4; PNO1; PNPT1; QKI; SF1; and TDRKH

[0529] In certain example embodiments, the RNA-binding protein comprises a zinc finger motif. RNA-binding proteins or functional domains thereof may comprise a Cys2-His2, Gag-knuckle, Treble-clet, Zinc ribbon, Zn2/Cys6 class motif.

[0530] In certain example embodiments, the RNA-binding protein may comprise a Pumilio homology domain.

[0531] In certain example embodiments, the RNA-binding protein may comprise a CRISPR-Cas system. In certain example embodiments, the CRISPR-Cas system may be Cas13 CRISPR-Cas system, such as a Cas13a, Cas13b, or Cas13c system

### Linker

[0532] In particular embodiments, of the methods of the present invention, recruitment of the nucleotide deaminase to the target locus is ensured by fusing the nucleotide deaminase or catalytic domain thereof to the CRISPR-Cas protein, which is a Cas13 protein. Methods of generating a fusion protein from two separate proteins are known in the art and typically involve the use of spacers or linkers. The Cas13 protein can be fused to the nucleotide deaminase protein or catalytic domain thereof on either the N- or C-terminal end thereof. In particular embodiments, the CRISPR-Cas protein is an inactive or dead Cas13 protein and is linked to the N-terminus of the deaminase protein or its catalytic domain.

[0533] The term “linker” as used in reference to a fusion protein refers to a molecule which joins the proteins to form a fusion protein. Generally, such molecules have no specific biological activity other than to join or to preserve some minimum distance or other spatial relationship between the proteins. However, in certain embodiments, the linker may be selected to influence some property of the linker and/or the fusion protein such as the folding, net charge, or hydrophobicity of the linker.

[0534] Suitable linkers for use in the methods of the present invention are well known to those of skill in the art and include, but are not limited to, straight or branched-chain carbon linkers, heterocyclic carbon linkers, or peptide linkers. However, as used herein the linker may also be a covalent bond (carbon-carbon bond or carbon-heteroatom bond). In particular embodiments, the linker is used to separate the CRISPR-Cas protein and the nucleotide deaminase by a distance sufficient to ensure that each protein retains its required functional property. Preferred peptide linker sequences adopt a flexible extended conformation and do not exhibit a propensity for developing an ordered secondary structure. In certain embodiments, the linker can be a chemical moiety which can be monomeric, dimeric, multimeric or polymeric. Preferably, the linker comprises amino acids. Typical amino acids in flexible linkers include Gly, Asn and Ser. Accordingly, in particular embodiments, the linker comprises a combination of one or more of Gly, Asn and Ser amino acids. Other near neutral amino acids, such as Thr and Ala, also may be used in the linker sequence. Exemplary linkers are disclosed in Maratea et al. (1985), Gene 40: 39-46; Murphy et al. (1986) Proc. Nat′l. Acad. Sci. USA 83: 8258-62; U.S. Pat. Nos. 4,935,233; and 4,751,180. For example, GlySer linkers GGS, GGGS or GSG can be used. GGS, GSG, GGGS or GGGGS linkers can be used in repeats of 3 (such as (GGS)3 (SEQ ID No. 12), (GGGGS)3) or 5, 6, 7, 9 or even 12 (SEQ ID No. 13) or more, to provide suitable lengths. In particular embodiments, linkers such as (GGGGS)3 are preferably used herein. (GGGGS)6 (GGGGS)9 or (GGGGS)12 may preferably be used as alternatives. Other preferred alternatives are (GGGGS)1 (SEQ ID No 14), (GGGGS)2 (SEQ ID No. 15), (GGGGS)4, (GGGGS)5, (GGGGS)7, (GGGGS)8, (GGGGS)10, or (GGGGS)11 (SEQ ID NO:2, 3, 5, 6, 8, or 9, respectively). In yet a further embodiment, LEPGEKPYKCPECGKSFSQSGALTRHQRTHTR (SEQ ID No:11) is used as a linker. In yet an additional embodiment, the linker is XTEN linker. In particular embodiments, the CRISPR-cas protein is a Cas13 protein and is linked to the deaminase protein or its catalytic domain by means of an LEPGEKPYKCPECGKSFSQSGALTRHQRTHTR (SEQ ID No. 11) linker. In further particular embodiments, the Cas13 protein is linked C-terminally to the N-terminus of a deaminase protein or its catalytic domain by means of an LEPGEKPYKCPECGKSFSQSGALTRHQRTHTR (SEQ ID No. 11) linker. In addition, N- and C-terminal NLSs can also function as linker (e.g., PKKKRKVEASSPKKRKVEAS (SEQ ID No. 16)).

[0535] Example linkers are shown in the table below.

GGS
GGTGGTAGT
GGSx3 (9)
GGTGGTAGTGGAGGGAGCGGCGGTTCA
GGSx7 (21)
ggtggaggaggctctggtggaggcggtagcggaggcggagggtcgGGTGG
TAGTGGAGGGAGCGGCGGTTCA
XTEN
TCGGGATCTGAGACGCCTGGGACCTCGGAATCGGCTACGCCCGAAAGT
Z-EGFR_Short
gtggataacaaatttaacaaagaaatgtgggcggcgtgggaagaaattcg
taacctgccgaacctgaacggctggcagatgaccgcgtttattgcgagcc
tggtggatgatccgagccagagcgcgaacctgctggcggaagcgaaaaaa
ctgaacgatgcgcaggcgccgaaaaccggcggtggttctggt
GSAT
ggtggttctgccggtggctccggttctggctccagcggtggcagctctgg
tgcgtccggcacgggtactgcgggtggcactggcagcggttccggtactg
gctctggc

### Adaptor Protein

[0536] In particular embodiments of the methods of the present invention, the nucleotide deaminase protein or catalytic domain thereof is delivered to the cell or expressed within the cell as a separate protein, but is modified so as to be able to link to either the Cas13 protein or the guide molecule. In particular embodiments, this is ensured by the use of orthogonal RNA-binding protein or adaptor protein/aptamer combinations that exist within the diversity of bacteriophage coat proteins. Examples of such coat proteins include but are not limited to: MS2, PP7, Qβ, F2, GA, fr, JP501, M12, R17, BZ13, JP34, JP500, KU1, M11, MX1, TW18, VK, SP, FI, ID2, NL95, TW19, AP205, Cb5, ϕCb8r, ϕCb12r, ϕCb23r, 7s and PRR1. Aptamers can be naturally occurring or synthetic oligonucleotides that have been engineered through repeated rounds of in vitro selection or SELEX (systematic evolution of ligands by exponential enrichment) to bind to a specific target.

[0537] In particular embodiments of the methods and systems of the present invention, the guide molecule is provided with one or more distinct RNA loop(s) or distinct sequence(s) that can recruit an adaptor protein. A guide molecule may be extended, without colliding with the Cas13 protein by the insertion of distinct RNA loop(s) or distinct sequence(s) that may recruit adaptor proteins that can bind to the distinct RNA loop(s) or distinct sequence(s). Examples of modified guides and their use in recruiting effector domains to the CRISPR-Cas complex are provided in Konermann (Nature 2015, 517(7536): 583-588). In particular embodiments, the aptamer is a minimal hairpin aptamer which selectively binds dimerized MS2 bacteriophage coat proteins in mammalian cells and is introduced into the guide molecule, such as in the stemloop and/or in a tetraloop. In these embodiments, the nucleotide deaminase protein is fused to MS2. The nucleotide deaminase protein is then co-delivered together with the CRISPR-Cas protein and corresponding guide RNA.

[0538] In certain embodiments of the methods provided herein, the CRISPR-Cas protein and the deaminase protein are delivered to the cell or expressed within the cell as separate proteins. In these embodiments, each of the CRISPR-Cas and deaminase protein can be provided with one or more NLSs as described herein. In certain embodiments, the CRISPR-Cas and deaminase proteins are delivered to the cell or expressed with the cell as a fusion protein. In these embodiments one or both of the CRISPR-Cas and deaminase protein is provided with one or more NLSs. Where the nucleotide deaminase is fused to an adaptor protein (such as MS2) as described above, the one or more NLS can be provided on the adaptor protein, provided that this does not interfere with aptamer binding. In particular embodiments, the one or more NLS sequences may also function as linker sequences between the nucleotide deaminase and the CRISPR-Cas protein.

[0539] In certain embodiments, guides of the invention comprise specific binding sites (e.g. aptamers) for adapter proteins, which may be linked to or fused to an nucleotide deaminase or catalytic domain thereof. When such a guides forms a CRISPR complex (i.e. CRISPR-Cas protein binding to guide and target) the adapter proteins bind and, the nucleotide deaminase or catalytic domain thereof associated with the adapter protein is positioned in a spatial orientation which is advantageous for the attributed function to be effective.

[0540] The skilled person will understand that modifications to the guide which allow for binding of the adapter+nucleotide deaminase, but not proper positioning of the adapter+nucleotide deaminase (e.g. due to steric hindrance within the three dimensional structure of the CRISPR complex) are modifications which are not intended. The one or more modified guide may be modified at the tetra loop, the stem loop 1, stem loop 2, or stem loop 3, as described herein, preferably at either the tetra loop or stem loop 2, and most preferably at both the tetra loop and stem loop 2.

### Sequences for Targeting to the Nucleus

[0541] In some embodiments, the methods of the present invention relate to modifying an nucleotide in a target locus of interest, whereby the target locus is within a cell. In order to improve targeting of the CRISPR-Cas protein and/or the nucleotide deaminase protein or catalytic domain thereof used in the methods of the present invention to the nucleus, it may be advantageous to provide one or both of these components with one or more nuclear localization sequences (NLSs).

[0542] In preferred embodiments, the NLSs used in the context of the present invention are heterologous to the proteins. Non-limiting examples of NLSs include an NLS sequence derived from: the NLS of the SV40 virus large T-antigen, having the amino acid sequence PKKKRKV (SEQ ID No. 17) or PKKKRKVEAS (SEQ ID No. 18); the NLS from nucleoplasmin (e.g., the nucleoplasmin bipartite NLS with the sequence KRPAATKKAGQAKKKK (SEQ ID No. 19)); the c-myc NLS having the amino acid sequence PAAKRVKLD (SEQ ID No. 20) or RQRRNELKRSP (SEQ ID No. 21); the hRNPA1 M9 NLS having the sequence NQSSNFGPMKGGNFGGRSSGPYGGGGQYFAKPRNQGGY (SEQ ID No. 22); the sequence RMRIZFKNKGKDTAELRRRRVEVSVELRKAKKDEQILKRRNV (SEQ ID No. 23) of the IBB domain from importin-alpha; the sequences VSRKRPRP (SEQ ID No. 24) and PPKKARED (SEQ ID No. 25) of the myoma T protein; the sequence PQPKKKPL (SEQ ID No. 26) of human p53; the sequence SALIKKKKKMAP (SEQ ID No. 27) of mouse c-abl IV; the sequences DRLRR (SEQ ID No. 28) and PKQKKRK (SEQ ID No. 29) of the influenza virus NS1; the sequence RKLKKKIKKL (SEQ ID No. 30) of the Hepatitis virus delta antigen; the sequence REKKKFLKRR (SEQ ID No. 31) of the mouse Mx1 protein; the sequence KRKGDEVDGVDEVAKKKSKK (SEQ ID No. 32) of the human poly(ADP-ribose) polymerase; and the sequence RKCLQAGMNLEARKTKK (SEQ ID No. 33) of the steroid hormone receptors (human) glucocorticoid. In general, the one or more NLSs are of sufficient strength to drive accumulation of the DNA-targeting Cas protein in a detectable amount in the nucleus of a eukaryotic cell. In general, strength of nuclear localization activity may derive from the number of NLSs in the CRISPR-Cas protein, the particular NLS(s) used, or a combination of these factors. Detection of accumulation in the nucleus may be performed by any suitable technique. For example, a detectable marker may be fused to the nucleic acid-targeting protein, such that location within a cell may be visualized, such as in combination with a means for detecting the location of the nucleus (e.g., a stain specific for the nucleus such as DAPI). Cell nuclei may also be isolated from cells, the contents of which may then be analyzed by any suitable process for detecting protein, such as immunohistochemistry, Western blot, or enzyme activity assay. Accumulation in the nucleus may also be determined indirectly, such as by an assay for the effect of nucleic acid-targeting complex formation (e.g., assay for deaminase activity) at the target sequence, or assay for altered gene expression activity affected by DNA-targeting complex formation and/or DNA-targeting), as compared to a control not exposed to the CRISPR-Cas protein and deaminase protein, or exposed to a CRISPR-Cas and/or deaminase protein lacking the one or more NLSs.

[0543] The CRISPR-Cas and/or nucleotide deaminase proteins may be provided with 1 or more, such as with, 2, 3, 4, 5, 6, 7, 8, 9, 10, or more heterologous NLSs. In some embodiments, the proteins comprises about or more than about 1, 2, 3, 4, 5, 6, 7, 8, 9, 10, or more NLSs at or near the amino-terminus, about or more than about 1, 2, 3, 4, 5, 6, 7, 8, 9, 10, or more NLSs at or near the carboxy-terminus, or a combination of these (e.g., zero or at least one or more NLS at the amino-terminus and zero or at one or more NLS at the carboxy terminus). When more than one NLS is present, each may be selected independently of the others, such that a single NLS may be present in more than one copy and/or in combination with one or more other NLSs present in one or more copies. In some embodiments, an NLS is considered near the N- or C-terminus when the nearest amino acid of the NLS is within about 1, 2, 3, 4, 5, 10, 15, 20, 25, 30, 40, 50, or more amino acids along the polypeptide chain from the N- or C-terminus. In preferred embodiments of the CRISPR-Cas proteins, an NLS attached to the C-terminal of the protein.

[0544] In some embodiments, a component (e.g., the dead Cas protein, the nucleotide deaminase protein or catalytic domain thereof, or a combination thereof) in the systems may comprise one or more nuclear export signals (NES), one or more nuclear localization signals (NLS), or any combinations thereof. In some cases, the NES may be an HIV Rev NES. In certain cases, the NES may be MAPK NES. When the component is a protein, the NES or NLS may be at the C terminus of component. Alternatively or additionally, the NES or NLS may be at the N terminus of component. In some examples, the Cas13 protein and optionally said nucleotide deaminase protein or catalytic domain thereof comprise one or more heterologous nuclear export signal(s) (NES(s)) or nuclear localization signal(s) (NLS(s)), preferably an HIV Rev NES or MAPK NES, preferably C-terminal.

### Cell

[0545] The present disclosure may also include one or more cells, or progeny thereof, or tissues, organs, or organisms containing cell(s). In some cases, the cells may be obtained using the method described herein. In some cases, the cells may comprise the system. In some examples, the cells may be modified cells. In some embodiments, the modified cell may be obtained by the targeted deamination using the AD-functionalized CRISPR system, or progeny thereof, wherein the modified cell comprises an I or G in replace of the A in the target RNA sequence of interest compared to a corresponding cell before the targeted deamination. The modified cell can be a eukaryotic cell, such as an animal cell, a plant cell, an mammalian cell, or a human cell.

[0546] In some embodiments, the modified cell is a therapeutic T cell, such as a T cell suitable for CAR-T therapies. The modification may result in one or more desirable traits in the therapeutic T cell, including but not limited to, reduced expression of an immune checkpoint receptor (e.g., PDA, CTLA4), reduced expression of HLA proteins (e.g., B2M, HLA-A), and reduced expression of an endogenous TCR.

[0547] In some embodiments, the modified cell is an antibody-producing B cell. The modification may results in one or more desirable traits in the B cell, including but not limited to, enhanced antibody production.

[0548] The invention also relates to a modified non-human animal or a modified plant. The modified non-human animal can be a farm animal. The modified plant can be an agricultural crop. Such non-human animal or plant may comprise one or more cells and/or their progeny described herein.

[0549] The invention further relates to a method for cell therapy, comprising administering to a patient in need thereof the modified cell described herein, wherein the presence of the modified cell remedies a disease in the patient. In one embodiment, the modified cell for cell therapy is a CAR-T cell capable of recognizing and/or attacking a tumor cell. In another embodiment, the modified cell for cell therapy is a stem cell, such as a neural stem cell, a mesenchymal stem cell, a hematopoietic stem cell, or an iPSC cell.

[0550] The invention additionally relates to an engineered, non-naturally occurring system suitable for modifying an Adenine in a target locus of interest, comprising: a guide molecule which comprises a guide sequence, or a nucleotide sequence encoding the guide molecule; a CRISPR-Cas protein, or one or more nucleotide sequences encoding the CRISPR-Cas protein; an nucleotide deaminase protein or catalytic domain thereof, or one or more nucleotide sequences encoding; wherein the nucleotide deaminase protein or catalytic domain thereof is covalently or non-covalently linked to the CRISPR-Cas protein or the guide molecule or is adapted to link thereto after delivery; wherein the guide sequence is capable of hybridizing with a target sequence comprising an Adenine within an RNA polynucleotide of interest, but comprises a Cytosine at the position corresponding to the Adenine.

[0551] The invention additionally relates to an engineered, non-naturally occurring vector system suitable for modifying an Adenine in a target locus of interest, comprising one or more vectors comprising: a first regulatory element operably linked to one or more nucleotide sequences encoding a guide molecule which comprises a guide sequence; a second regulatory element operably linked to a nucleotide sequence encoding a CRISPR-Cas protein; and optionally a nucleotide sequence encoding an nucleotide deaminase protein or catalytic domain thereof which is under control of the first or second regulatory element or operably linked to a third regulatory element; wherein, if the nucleotide sequence encoding an nucleotide deaminase protein or catalytic domain thereof is operably linked to a third regulatory element, the nucleotide deaminase protein or catalytic domain thereof is adapted to link to the guide molecule or the Crispr-Cas protein after expression; wherein the guide sequence is capable of hybridizing with a target sequence comprising an Adenine within the target locus, but comprises a Cytosine at the position corresponding to the Adenine; wherein components (a), (b) and (c) are located on the same or different vectors of the system.

[0552] The invention additionally relates to in vitro, ex vivo or in vivo host cell or cell line or progeny thereof comprising the engineered, non-naturally occurring system or vector system described herein. The host cell can be a eukaryotic cell, such as an animal cell, a plant cell, an mammalian cell, or a human cell.

[0553] Other Compositions

[0554] In another aspect, the present disclosure also comprise a composition comprising a library of guide molecules. In some examples, the library may comprise at least 100, at least 1000, or at least 10,000 different guide molecules. Each guide molecule may be capable of forming a complex with a Cas protein (e.g., Cas 13 protein such as dead Cas 13 protein) and may direct the complex to bind a target sequence (e.g., RNA) encoding a phosphorylation site of a protein involved in a cell signaling pathway.

[0555] In another aspect, the present disclosure comprises a composition comprising a population of cells. The population of cells may be obtainable or obtained by introducing a library of guide molecules to a population cells In some examples, the population of cells may be obtainable or obtained by introducing: introducing a library of guide molecules into at least 100, at least 1,000, or at least 10,000 cells. In certain examples, at an average ratio between the guide molecule and cell is no more than one guide (e.g., guide RNA) per cell. The cells each may express a catalytically inactive Cas protein (e.g., dead Cas13) and an nucleotide deaminase protein or catalytic domain thereof. The nucleotide deaminase protein or catalytic domain thereof may be covalently or non-covalently linked to the Cas13 protein or is adapted to bind the guide molecule after introduction thereof. In certain examples, the populations of cells may be obtainable or obtained by introducing a library of guide molecules into at least 100, at least 1,000 or at least 10,000 cells at an average ratio of no more than one guide molecule (e.g., guide RNA) per cell, and simultaneously or sequentially introducing to the cells one or more nucleic acid sequences encoding the catalytically inactive Cas13 protein and the nucleotide deaminase protein or catalytic domain thereof.

### Methods

[0556] The present disclosure also includes methods for modifying a nucleobase in a target nucleic acid sequence. In some embodiments, the methods may be used for modifying post-translational modification sites on proteins encoded by target nucleic acids (e.g., RNAs). In some embodiments, the method is an in vitro or ex vivo method (e.g., when the target nucleic acid is a human or animal nucleic acid).

[0557] The methods may comprise delivering the systems herein to a target sequence, e.g., a target RNA sequence. In certain examples, the nucleobase may be an Adenine. In certain examples, the nucleobase may be a cytosine. In some cases, the target nucleic acid sequence may be a target DNA sequence of interest or a target RNA sequence of interest. In some embodiments, the methods are for targeted deamination of adenine in RNA, more particularly in an RNA sequence of interest. According to the methods of the invention, the nucleotide deaminase protein is recruited specifically to the relevant Adenine in the RNA sequence of interest by a CRISPR-Cas complex which can specifically bind to a target sequence. In order to achieve this, the nucleotide deaminase protein can either be covalently linked to the CRISPR-Cas protein or be provided as a separate protein, but adapted so as to ensure recruitment thereof to the CRISPR-Cas complex. In some cases, the CRISPR-Cas protein may be a catalytically inactive (dead) Cas protein. For example, the dead Cas protein may be dead Cas13, such as dead Cas13a, dead Cas13b, or dead Cas 13c.

[0558] In some embodiments, the invention also relates to a method for knocking-out or knocking-down an undesirable activity of a gene, wherein the deamination of the A at the transcript of the gene results in a loss of function. For example, in one embodiment, the targeted deamination by the AD-functionalized CRISPR system can cause a nonsense mutation resulting in a premature stop codon in an endogenous gene. This may alter the expression of the endogenous gene and can lead to a desirable trait in the edited cell. In another embodiment, the targeted deamination by the AD-functionalized CRISPR system can cause a nonconservative missense mutation resulting in a code for a different amino acid residue in an endogenous gene. This may alter the function of the endogenous gene expressed and can also lead to a desirable trait in the edited cell.

### Inhibition of Phosphorylation

[0559] In certain example embodiments, methods and systems are provided for inhibiting intracellular phosphorylation of serine, threonine, and tyrosine by editing the genetic codon of these amino acids by means of site-directed RNA editing of RNA molecules. In some embodiments, the nucleotide deaminase protein or catalytic domain thereof in the system may modify a nucleic acid by deaminating an Adenine or Cytidine at the one or more codons thereby changing the codon to encode for an amino acid that is not post-translationally modified. The modification may change the encoded amino acid from a serine, threonine, or tyrosine to an amino acid that cannot be phosphorylated.

[0560] Pathological activation of cell signaling mediated by phosphorylation is involved in may diseases including cancer, immunodeficiency diseases or disorders, infectious disease, inflammatory disorders, and neurodegenerative diseases disorders. In some embodiments, the methods and systems may be used in the treatment or prevention of a disease by inhibiting activation of pathological activation of cell signaling mediated by post-translational modification, preferably phosphorylation.

[0561] The modification made by the systems and methods herein may inactivate a phosphorylation site of a protein involved in a signaling pathway. Examples of the signaling pathways include the MDM2-p53 signaling pathway, the PI3K-Akt signaling pathways, the Akt-MDM2 signaling pathway, the Ras signaling pathways, the GPCR signaling pathway, the Wnt signaling pathway, the Hippo signaling pathway, the TGF signaling pathway, the NF-κB signaling pathway, the Notch signaling pathway, the Hedgehog signaling pathway, the cell-cycle signaling pathway, or a combination thereof. In some cases, the modification modulates multiple signaling pathways. In some examples, the modification modulates at least two signaling pathways, e.g., at least two pathways described herein. In some examples, the modification modulates at least three signaling pathways, e.g., at least three pathways described herein. In some cases, the modification modulates at least one p53-dependent signaling pathway. In some cases, the modification modulates at least one p53-independent signaling pathway. In some cases, the modification modulates at least one p53-dependent signaling pathway and at least one p53-independent signaling pathway.

[0562] In some cases, the modification inactivates a phosphorylation site of a protein involved in the MDM2-p53 signaling pathway and the PI3K-Akt signaling pathway. In some examples, the modification may inactive phosphorylation of MDM2 at S166, S190, S240, S242, S246, S260, S386, S395, S407, T419, S425, and/or S439. In some examples, the modification may inactive phosphorylation of Akt at S473 and/or T308. In some examples, the modification may inactive phosphorylation of MDM4 at S96, Y99, S296, S342, S367, and/or 5403. In some examples, the modification may inactive phosphorylation of MDM2 at S166, S190, S240, S242, S246, S260, S386, S395, S407, T419, S425, and/or S439, of Akt at S473 and/or T308, and of MDM4 at S96, Y99, S296, S342, S367, and/or S403.

[0563] In some cases, the modification inactivates a phosphorylation site of IκBα at S32 and/or S36. In some cases, the modification inactivates a phosphorylation site of NIK at T599. In some cases, the modification inactivates a phosphorylation site of p100 at S866, S870, and/or S872. In some cases, the modification inactivates a phosphorylation site of Notch1 at S2152. In some cases, the modification inactivates a phosphorylation site of Raf-1 at S43, S259, S338, and/or Y341. In some cases, the modification inactivates a phosphorylation site of β-catenin at S33, S37, S45, and/or T41. In some cases, the modification inactivates a phosphorylation site of BAD at S122 and/or S136. In some cases, the modification inactivates a phosphorylation site of GSK-3β at S9. In some cases, the modification inactivates a phosphorylation site of RelA(p65) at S910. In some cases, the modification inactivates a phosphorylation site of YAP at S61, S109, S127, S164, S381, and/or S384. In some cases, the modification inactivates a phosphorylation site of TAZ at S66, S89, S117, and/or S311. In some cases, the modification inactivates a phosphorylation site of YAP at S127. In some cases, the modification inactivates a phosphorylation site of Caspase-9 at S196. In some cases, the modification inactivates a phosphorylation site of MLK3 at S647. In some cases, the modification inactivates a phosphorylation site of ASK1 at S83. In some cases, the modification inactivates a phosphorylation site of CREB at S133. In some cases, the modification inactivates a phosphorylation site of FOXO1 at S256, S319, and/or T24. In some cases, the modification inactivates a phosphorylation site of FOXO2 at S32, S253, and/or S315. In some cases, the modification inactivates a phosphorylation site of FOXO4 at S193, S258, and/or T28. In some cases, the modification inactivates a phosphorylation site of IKKa at T23. In some cases, the modification inactivates a phosphorylation site of IκBα at S32 and/or S36, of NIK at T599, of p100 at S866, S870, and/or S872, of Notch1 at S2152, of Raf-1 at S43, S259, S338, and/or Y341, of β-catenin at S33, S37, S45, and/or T41, of BAD at S122 and/or S136, of GSK-3β at S9, of RelA(p65) at S910, of YAP at S61, S109, S127, S164, S381, and/or S384, of TAZ at S66, S89, S117, and/or S311, of YAP at S127, of Caspase-9 at S196, of MLK3 at S647, of ASK1 at S83, of CREB at S133, of FOXO1 at S256, S319, and/or T24, of FOXO2 at S32, S253, and/or S315, of FOXO4 at S193, S258, and/or T28, and of IKKa at T23. In some cases, the amino acid positions correspond to amino acid positions in human. In certain cases, the phosphorylation sites described herein also include corresponding amino acid positions in non-human species.

[0564] In some embodiments, the modification inactivates multiple phosphorylation sites on the same protein. In certain examples, the modification inactivates at least two phosphorylation sites of the same protein. In some examples, the modification inactivates at least three phosphorylation sites of the same protein. A plurality of different guide molecules may be used to target multiple phosphorylation sites of the same protein. In certain examples, at least two different guide molecule may be used to target at least two phosphorylation sites of the same protein. In certain examples, at least three different guide molecule may be used to target at least three phosphorylation sites of the same protein. Alternatively or additionally, a single guide molecule is used to target multiple (e.g., at least two or at least three) phosphorylation sites of the same protein, e.g., when the phosphorylation sites close to each other.

[0565] In some embodiments, the modification inactivates phosphorylation sites of multiple proteins in the same signaling pathway. In certain examples, the modification inactivates phosphorylation sites of at least two proteins in the same signaling pathway. In certain examples, the modification inactivates phosphorylation sites of at least three proteins in the same signaling pathway.

[0566] In certain example embodiments, the systems and methods disclosed herein are used to modify genetic codons to inhibit phosphorylation of amino acids associated with pathological signaling in cancer. Example cancers include acute lymphoblastic leukemia, acute myeloid leukemia, adrenocortical carcinoma, Kaposi sarcoma, AIDs-related lymphoma, Primary CNS lymphoma, anal cancer, astrocytomas, atypical teratoid/rhabdoid tumor, basal cell carcinoma, bile duct cancer, bladder cancer, bone cancer, breast cancer, carcinoid tumors, cardiac tumors, embryonal tumors, germ cell tumors, cervical cancer, chronic lyphocytic leukemia, chronic myelogenous leukemia, chronic myeloproliferative neoplasms, colorectal cancer, craniopharyngioma, endometrial cancer, ependymoma, esophageal cancer, esthesioneuroblastoma, Ewing sarcoma, extracranial germ cell tumor, extragonadal germ cell tumor, intraocular melanoma, retinoblastoma, fallopian tube cancer, fibrous histocytoma, gallbladder cancer, gastric cancer, gastrointestinal carcinoid tumor, gastrointestinal stromal tumors, gestational trophoblastic disease, haircy cell leukemia, head and neck cancer, hepatocellular cancer, histiocytosis, Hodgkin lymphoma, hypopharyngeal cancer, islet cell tumors, Kaposi sarcoma, kidney cancer, Langerhans cell histiocytosis, lip and oral cavity cancer, liver cancer, lung cancer, lymphoma, male breast cancer, malignant fibrous histiocytoma of bone, melanoma, Merkel cell carcinoma, mesothelioma, metastaic cancer, metastaic squamous neck cancer with occult primary, mouth cancer, multiple myeloma, mycrosis fungoides, myelodysplastic syndromes, nasal cavity and paranasal sinus cancer, nasopharyngeal cancer, neuroblastoma, Non-Hodgkins lymphoma, non-small cell lung cancer, ovarian cancer, pancreatic cancer, pancreatic neuroendocrine tumors, paraganglioma, parathyroid cancer, penile cancer, pharyngeal cancer, pheochromocytoma, pituitary tumor, primary central nervous system lymphoma, primary peritoneal cancer, prostate cancer, rectal cancer, retinoblastoma, rhabdomyosarcoma, salivary gland cancer, Sezzary syndrome, Small cell lung cancer, small intestine cancer, soft tissue sarcoma, testicular cancer, thymoma and thymic carcinoma, thyroid cancer, ureter and renal pelvis, transitional cell cancer, urethral cancer, uterine cancer, uterine sarcoma, vaginal cancer, vascular tumors, vulvar cancer, Wilms tumor. In certain examples, the disease is a p53 WT lymphoma.

[0567] In certain example embodiments, the systems and methods disclosed herein are used to modify genetic codons to inhibit phosphorylation of amino acids associated with pathological signaling in inflammatory diseases and disorders. Example inflammatory diseases and disorders include, but are not limited to ankylosing spondylitis, arthristi (osteoarthritic, rheumatoid arthritis, psoriatic arthritis), asthma, atherosclerosis, Crohn's disease, colitis, dermatitis, diverticulitis, fibromyalgia, hepatitis, irritable bowl syndrome, systemic lupus erythematous, nephritis, and ulcerative colitis.

[0568] In certain example embodiments, the systems and methods disclosed herein are use to modify genetic codons to inhibit phosophorylation of amino acids associated with pathological signaling in immunodeficiency diseases and disorders. Example immunodeficiency diseases and disorders include, but are not limited to, ataxia-telangiectasia, Chediak-Higashi syndrome, combined immunodeficiency disease, complement deficiencies, DiGeorge syndrome, hypogammaglobulinemia, Job syndrome, leukocyte adhesion defects, panhypogammaglobulinemia, Bruton's disease, congentical agammaglobulinemia, selective defiency of IgA, Wiskott-Aldrich syndrome, X-linked agammaglobulinemia, common variable immunodeficiency (CVID), severe combined immunodeficiency (SCID).

[0569] In certain example embodiments, the systems and methods disclosed herein are used to modify genetic codons to inhibit phosphorylation of amino acids associated with pathological signaling in neurodegenerative disease and disorders. Example neurodegenerative diseases and disorders include, but are not limited to, dementia, motor neuron disease, systemic atrophies primarily affecting the central nervous system, Tay-Sachs disease, transmissible spongiform encephalopathies, Ataxia-telangiectasia, autosomal dominant cerebellar ataxia, autosomal recessive spastic ataxia of Charlevoix-Saguenay, Baggio-Yoshinari syndrome, Batten disease, corticobasal degeneration, Creutzfeldt-Jakob disease, estrogen and neurodegenerative diseases, fatal familial insomnia, fragile X-associated tremor/ataxia syndrome, frontotemporal dementia and parkinsonism linked to chromosome 17, hereditary motor and sensory neuropathy with proximal dominance, infantile refsum disease, JUNQ and IPOD, Kufor-Rakep syndrome, Kufs disease, locomotor ataxia, Machado-Joseph disease, lyme disease, mental retardation with pontine and cerebellar hypoplasia, mitochondrial associated membranes, multiple system atrophy, neuroacanthocytosis, Niemann-Pick disease, pontocerebellar hypoplasia, pyruvate dehydrogenase deficiency, Refsum disease, Sandhoff disease, Shy-Drager syndrome, spinocerebellar ataxia, subacute combined degeneration of spinal cord, subacute sclerosing panencephalitis, Tabes dorsalis, Tay-Sachs disease, toxic encephalopathy, toxic leukoencephalopathy, transneuronal degeneration, Wobbly hedgehog syndrome, Alzheimers disease, Parkinson disease.

[0570] In certain example embodiments, the methods and systems described herein comprise inactivating the phosphorylation site of a protein involved in the Akt signaling pathway. In some embodiments, the protein involved in the Akt-signalling pathway is selected from AKT, YAP, BAD, Caspase-9, FOX01, FOX03, FOX04, IKK, CREB, MMD2, MDM4, MLK3, ASK1. In certain example embodiments, the methods and systems are used to introduce a modification that inactivates a phosphorylation site of MDM2 at one or more of S166, S190, S240, S242, S260, S262, S386, S395, S407, T419, S425, and S429. In certain example embodiments, the methods and systems are used to introduce a modification that inactivates a phosphorylation site of AKT at S473 and/or T308. In certain example embodiments, the methods and systems are used to introduce a modification that inactivates a phosphorylation site of MDM4 at S96, Y99, S296, S342, S367, and/r S403. Trends Cell Biology 2010; 20(5):299-309.

[0571] In addition to the Akt-MDM2 signaling pathway, the method described herein also encompasses targeted mutation of one or more proteins of one or more additional signaling pathways involved in tumorigenesis, tumor progression, and/or inflammation.

[0572] In some embodiments, the method described herein comprises inactivating the phosphorylation site of a protein involved in the Ras signaling pathway, such as by base-editing an mRNA encoding the protein. In some embodiments, the protein involved in the Ras signaling pathway is selected from Ras, NF1, BAD, ALK, ROS1, EGFR, HER2, C3G, Crk, GRB2, SOS, FAK, Src, PI3K, ILK, GRAF, RIAM/Talin, Rab8a (c-Mel), Rho, RaIGEF, RaIA, RaIB, RaIBP1, RasGAP, RhoGEFs, Cdc42, Rac, PAK1, INK, KSR, 14-3-3, c-Raf, Raf-1, B-Raf, Rap, MEK1/2, ERK1/2, MP1, VHL, HPH, HIF-1α, HIF-1β, p90RSK, CREB, Myc, Max, and Elk-1.

[0573] In some embodiments, the method described herein comprises inactivating the phosphorylation site of a protein involved in the GPCR signaling pathway, such as by base-editing an mRNA encoding the protein. In some embodiments, the protein involved in the GPCR signaling pathway is selected from GPCR, EPAC, PKA, PLCP, CAMKII, PKC, SynGAP, RasGEF, RasGAP, RasGRP, RasGRF, Ras, c-Raf, MEK1/2, ERK1/2, MP1, Fos, and Jun.

[0574] In some embodiments, the method described herein comprises inactivating the phosphorylation site of a protein involved in the Wnt signaling pathway, such as by base-editing an mRNA encoding the protein. In some embodiments, the protein involved in the Wnt signaling pathway is selected from Wnt1, Wnt5A, Frizzled, LRP5/6. R-spondin, ZNRF3/RNF43, CKI, Dsh, PAR-1, LGR4,5,6, E-cadherin, α-catenin, β-catenin, p120, Src, 14-3-3, Ras, PI3K, GSK-3β, WTX, PP2A, APC, Axin, SOX, RAR, CBP, and TCF/LEF.

[0575] In some embodiments, the method described herein comprises inactivating the phosphorylation site of a protein involved in the Hippo signaling pathway, such as by base-editing an mRNA encoding the protein. In some embodiments, the protein involved in the Hippo signaling pathway is selected from CD44, FAT4, Mer, FRMD, KIBRA, Mst1/2, SAV1, LATS1/2, MOB1, YAP, 14-3-3, YAP/TAZ, TEAD, and Smad.

[0576] In some embodiments, the method described herein comprises inactivating the phosphorylation site of a protein involved in the c signaling pathway, such as by base-editing an mRNA encoding the protein. In some embodiments, the protein involved in the TGFβ signaling pathway is selected from TGFβ RI, TGFβ RII, SARA, Smad2/3, Smad7, TAK, TAB1, TAB2, MKK3/6, MKK7, p38, INK, ERK, Smad1/5/8, Smad4, Smurf, E2F, BMPRI, BMPRII, NLK, p107, E2F, Miz-1, Myc, Max, FOs, and Jun.

[0577] In some embodiments, the method described herein comprises inactivating the phosphorylation site of a protein involved in the NF-κB signaling pathway, such as by base-editing an mRNA encoding the protein. In some embodiments, the protein involved in the Death Receptor/NF-κB signaling pathway is selected from Fas/DR, ASK, TRADD, FADD, Casp-8,10, FLIPs, MKK7, INK, Bax, Bcl2, tBid, Bid, Bak, CytC, Apaf-1, Casp-9, cIAP, Smac, AIF, Casp-3,6,7, Lamins, PARP, ICAD, CAD, IL1R, IRAK, TRAF6, Myd88, TAK, TAB2, TAB3, TNFR, RIP, TRAF2, TRAF3, TRAF2/6, NIK, IKKα, IKKβ, NEMO, IκB, NFκB1/2, p100, RelA, and RelB.

[0578] In some embodiments, the method described herein comprises inactivating the phosphorylation site of a protein involved in the Notch signaling pathway, such as by base-editing an mRNA encoding the protein. In some embodiments, the protein involved in the Notch signaling pathway is selected from Notch, Notch1, Notch2, Notch3, Notch4, Furin, Fringe, Dsh, TACE, NIC, Presenilin, NUMB, NICD, HDAC, Sin3, CSL/CBF1, p300, HAT, and HES1.

[0579] In some embodiments, the method described herein comprises inactivating the phosphorylation site of a protein involved in the Hedgehog signaling pathway, such as by base-editing an mRNA encoding the protein. In some embodiments, the protein involved in the Notch signaling pathway is selected from CDO, BOC, Ptch, Smo, Hh, Su(Fu), KIF-7, Gli, and PKA.

[0580] In some embodiments, the method described herein comprises inactivating the phosphorylation site of a protein involved in the Warburg effect pathway, such as by base-editing an mRNA encoding the protein. In some embodiments, the protein involved in the Warburg effect pathway is selected from Glucose transporter, IDH1, IDH2, p53, Ras, Hexokinase, PFK, PKM2, and LDHA.

[0581] In some embodiments, the method described herein comprises inactivating the phosphorylation site of a protein involved in the cell-cycle signaling pathway, such as by base-editing an mRNA encoding the protein. In some embodiments, the protein involved in the cell-cycle signaling pathway is selected from p15, p16, p18, p19, CDK4/6, Cyclin D, Cdc25A, CDK2, Cyclin E, p21, p27, Cyclin A, CDK7, Cdc2, Cdc25B/C, Cyclin B, CyclinH, HPV-E7, HDAC, Rb, DP E2F, ATM, ATR, AbI, Chk1, Chk2, FANC, NBS1, BRCA1, DNA-PK, p53, HIPK2, Aurora A, HPV-E6, and ARF.

[0582] In one example, an mRNA encoding IκBα is base-edited to inactivated a phosphorylation site selected from serine residues S32 and S36. See Bastian et al., Molecular Cancer 12:86 (2013).

[0583] In another example, an mRNA encoding NIK is base-edited to inactivated a phosphorylation site selected from threonine residue 599. See Sun, Cell Research 21:71-85 (2011).

[0584] In another example, an mRNA encoding p100 is base-edited to inactivated a phosphorylation site selected from serine residues S866, S870 and S872. See Bastian et al., Molecular Cancer 12:86 (2013); Sun, Cell Research 21:71-85 (2011).

[0585] In another example, an mRNA encoding Notch1 is base-edited to inactivated a phosphorylation site selected from serine residue 2152. See Santio et al., Oncotarget 7(28):43220 (2016).

[0586] In another example, an mRNA encoding Raf-1 is base-edited to inactivated a phosphorylation site selected from serine residues 43, 259 and 338, and tyrosine residue 341. See Dhillon et al., Mol. Cell Biol. 22(10):3237-3246 (2002); Kolch et al., Biochem J. 351:289-305 (2000).

[0587] In another example, an mRNA encoding β-catenin is base-edited to inactivated a phosphorylation site selected from serine residues 33, 37 and 45, and threonine residue 41. See McDonald et al., Developmental Cell 17:9-26 (2009).

[0588] In another example, an mRNA encoding BAD is base-edited to inactivated a phosphorylation site selected from serine residues 122 and 136. See Gupta et al., Nat. Rev. Cancer 11(11):761-774 (2011).

[0589] In another example, an mRNA encoding GSK-3β is base-edited to inactivated a phosphorylation site selected from serine residue 9. See Stambolic et al., Biochem. J. 303:701-704 (1994).

[0590] In another example, an mRNA encoding RelA (p65) is base-edited to inactivated a phosphorylation site selected from serine residues 236, 276, 311, 468, 529 and 536. See Chaturvedi et al., Oncogene 30:1615-1630 (2011).

[0591] In another example, an mRNA encoding FAK is base-edited to inactivated a phosphorylation site selected from serine residue 910. See Kaplan et al., Oncogene 30:366-371 (2011).

[0592] In another example, an mRNA encoding YAP is base-edited to inactivated a phosphorylation site selected from serine residues 61, 109, 127, 164, 381, 384. See Moleirinho et al., Oncogene 32:1821-1830 (2013); Zhao et al., Genes & Development 24:862-874 (2010).

[0593] In another example, an mRNA encoding TAZ is base-edited to inactivated a phosphorylation site selected from serine residues 66, 89, 117, and 311. See Zhao et al., Genes & Development 24:862-874 (2010).

[0594] Other pathological phosphorylation sites may be identified using CRISPR genome-wide screens such as described in Example 4 below. Other screening method include proteogenomic screens such as those described in Mertins et al. Nature 2016; doie10.1038/nature18003.

[0595] The present disclosure may comprise a method for identifying a phosphorylation site associated with a target phenotype, comprising: selecting a population of cells (e.g., the population of cells comprising a library of guide molecules disclosed herein) based on a target phenotype, and determining relative representation of the guide molecules present in the selected cells and identifying a phosphorylation site association with the target phenotype. In some cases, the cells are cancer cells and the target phenotype is apoptosis, preferably in response to a cancer drug.

[0596] In another aspect, the present disclosure includes a method for detecting heptatitis B (HBV) associated diffuse large B-cell lymphoma (DLBCL). The method may comprise detecting one or more of TMSB4X, FAS, BCL6, KLF2, UBE2A, SGK1, CD70, BIG2, PIM1, CXCR4, DTX1, EBF1, TNFRSF14, TP53, ZFP36L1, CDK14, IKZF3, or TP73.

[0597] In another aspect, the present disclosure includes a method for treating a disease. The method may comprise targeting one or more pathways associated with this disease. In some examples, the method may be used for treating HBV-associated DLBCL. Such method may comprise targeting one or more of a) TP65, TP74, TP53, or a combination thereof, b) CDKN1B, BCL6, KLF2; c) CBP/p300; d) CD727-CD70 pathway or TNFRSF14-CD272 pathway.

### Delivery

[0598] In some embodiments, the components of the AD-functionalized CRISPR-Cas system may be delivered in various form, such as combinations of DNA/RNA or RNA/RNA or protein RNA. For example, the Cas13 protein may be delivered as a DNA-coding polynucleotide or an RNA-coding polynucleotide or as a protein. The guide may be delivered may be delivered as a DNA-coding polynucleotide or an RNA. All possible combinations are envisioned, including mixed forms of delivery. In certain examples, the components of the systems may be delivered or to be delivered as one or more polynucleotide molecules, as a ribonucleoprotein complex, optionally via particles, vesicles, or one or more viral vectors.

[0599] In some aspects, the invention provides methods comprising delivering one or more polynucleotides, such as or one or more vectors as described herein, one or more transcripts thereof, and/or one or proteins transcribed therefrom, to a host cell.

### Vectors

[0600] In general, the term “vector” refers to a nucleic acid molecule capable of transporting another nucleic acid to which it has been linked. It is a replicon, such as a plasmid, phage, or cosmid, into which another DNA segment may be inserted so as to bring about the replication of the inserted segment. Generally, a vector is capable of replication when associated with the proper control elements Vectors include, but are not limited to, nucleic acid molecules that are single-stranded, double-stranded, or partially double-stranded; nucleic acid molecules that comprise one or more free ends, no free ends (e.g., circular); nucleic acid molecules that comprise DNA, RNA, or both; and other varieties of polynucleotides known in the art. One type of vector is a “plasmid,” which refers to a circular double stranded DNA loop into which additional DNA segments can be inserted, such as by standard molecular cloning techniques. Another type of vector is a viral vector, wherein virally-derived DNA or RNA sequences are present in the vector for packaging into a virus (e.g., retroviruses, replication defective retroviruses, adenoviruses, replication defective adenoviruses, and adeno-associated viruses). Viral vectors also include polynucleotides carried by a virus for transfection into a host cell. Certain vectors are capable of autonomous replication in a host cell into which they are introduced (e.g., bacterial vectors having a bacterial origin of replication and episomal mammalian vectors). Other vectors (e.g., non-episomal mammalian vectors) are integrated into the genome of a host cell upon introduction into the host cell, and thereby are replicated along with the host genome. Moreover, certain vectors are capable of directing the expression of genes to which they are operatively-linked. Such vectors are referred to herein as “expression vectors.” Vectors for and that result in expression in a eukaryotic cell can be referred to herein as “eukaryotic expression vectors.” Common expression vectors of utility in recombinant DNA techniques are often in the form of plasmids.

[0601] Recombinant expression vectors can comprise a nucleic acid of the invention in a form suitable for expression of the nucleic acid in a host cell, which means that the recombinant expression vectors include one or more regulatory elements, which may be selected on the basis of the host cells to be used for expression, that is operatively-linked to the nucleic acid sequence to be expressed. Within a recombinant expression vector, “operably linked” is intended to mean that the nucleotide sequence of interest is linked to the regulatory element(s) in a manner that allows for expression of the nucleotide sequence (e.g., in an in vitro transcription/translation system or in a host cell when the vector is introduced into the host cell). Advantageous vectors include lentiviruses and adeno-associated viruses, and types of such vectors can also be selected for targeting particular types of cells.

[0602] With regards to recombination and cloning methods, mention is made of U.S. patent application Ser. No. 10/815,730, published Sep. 2, 2004 as US 2004-0171156 Δ1, the contents of which are herein incorporated by reference in their entirety.

[0603] The term “regulatory element” is intended to include promoters, enhancers, internal ribosomal entry sites (IRES), and other expression control elements (e.g., transcription termination signals, such as polyadenylation signals and poly-U sequences). Such regulatory elements are described, for example, in Goeddel, GENE EXPRESSION TECHNOLOGY: METHODS IN ENZYMOLOGY 185, Academic Press, San Diego, Calif. (1990). Regulatory elements include those that direct constitutive expression of a nucleotide sequence in many types of host cell and those that direct expression of the nucleotide sequence only in certain host cells (e.g., tissue-specific regulatory sequences). A tissue-specific promoter may direct expression primarily in a desired tissue of interest, such as muscle, neuron, bone, skin, blood, specific organs (e.g., liver, pancreas), or particular cell types (e.g., lymphocytes). Regulatory elements may also direct expression in a temporal-dependent manner, such as in a cell-cycle dependent or developmental stage-dependent manner, which may or may not also be tissue or cell-type specific. In some embodiments, a vector comprises one or more pol III promoter (e.g., 1, 2, 3, 4, 5, or more pol III promoters), one or more pol II promoters (e.g., 1, 2, 3, 4, 5, or more pol II promoters), one or more pol I promoters (e.g., 1, 2, 3, 4, 5, or more pol I promoters), or combinations thereof. Examples of pol III promoters include, but are not limited to, U6 and H1 promoters. Examples of pol II promoters include, but are not limited to, the retroviral Rous sarcoma virus (RSV) LTR promoter (optionally with the RSV enhancer), the cytomegalovirus (CMV) promoter (optionally with the CMV enhancer) [see, e.g., Boshart et al, Cell, 41:521-530 (1985)], the SV40 promoter, the dihydrofolate reductase promoter, the β-actin promoter, the phosphoglycerol kinase (PGK) promoter, and the EF1α promoter. Also encompassed by the term “regulatory element” are enhancer elements, such as WPRE; CMV enhancers; the R-U5′ segment in LTR of HTLV-I (Mol. Cell. Biol., Vol. 8(1), p. 466-472, 1988); SV40 enhancer; and the intron sequence between exons 2 and 3 of rabbit β-globin (Proc. Natl. Acad. Sci. USA., Vol. 78(3), p. 1527-31, 1981). It will be appreciated by those skilled in the art that the design of the expression vector can depend on such factors as the choice of the host cell to be transformed, the level of expression desired, etc. A vector can be introduced into host cells to thereby produce transcripts, proteins, or peptides, including fusion proteins or peptides, encoded by nucleic acids as described herein (e.g., clustered regularly interspersed short palindromic repeats (CRISPR) transcripts, proteins, enzymes, mutant forms thereof, fusion proteins thereof, etc.). With regards to regulatory sequences, mention is made of U.S. patent application Ser. No. 10/491,026, the contents of which are incorporated by reference herein in their entirety. With regards to promoters, mention is made of PCT publication WO 2011/028929 and U.S. application Ser. No. 12/511,940, the contents of which are incorporated by reference herein in their entirety.

[0604] Advantageous vectors include lentiviruses and adeno-associated viruses, and types of such vectors can also be selected for targeting particular types of cells.

[0605] In particular embodiments, use is made of bicistronic vectors for the guide RNA and (optionally modified or mutated) the CRISPR-Cas protein fused to nucleotide deaminase. Bicistronic expression vectors for guide RNA and (optionally modified or mutated) CRISPR-Cas protein fused to nucleotide deaminase are preferred. In general and particularly in this embodiment, (optionally modified or mutated) CRISPR-Cas protein fused to nucleotide deaminase is preferably driven by the CBh promoter. The RNA may preferably be driven by a Pol III promoter, such as a U6 promoter. Ideally the two are combined.

[0606] Vectors can be designed for expression of CRISPR transcripts (e.g. nucleic acid transcripts, proteins, or enzymes) in prokaryotic or eukaryotic cells. For example, CRISPR transcripts can be expressed in bacterial cells such as Escherichia coli, insect cells (using baculovirus expression vectors), yeast cells, or mammalian cells. Suitable host cells are discussed further in Goeddel, GENE EXPRESSION TECHNOLOGY: METHODS IN ENZYMOLOGY 185, Academic Press, San Diego, Calif. (1990). Alternatively, the recombinant expression vector can be transcribed and translated in vitro, for example using T7 promoter regulatory sequences and T7 polymerase.

[0607] Vectors may be introduced and propagated in a prokaryote or prokaryotic cell. In some embodiments, a prokaryote is used to amplify copies of a vector to be introduced into a eukaryotic cell or as an intermediate vector in the production of a vector to be introduced into a eukaryotic cell (e.g. amplifying a plasmid as part of a viral vector packaging system). In some embodiments, a prokaryote is used to amplify copies of a vector and express one or more nucleic acids, such as to provide a source of one or more proteins for delivery to a host cell or host organism. Expression of proteins in prokaryotes is most often carried out in Escherichia coli with vectors containing constitutive or inducible promoters directing the expression of either fusion or non-fusion proteins. Fusion vectors add a number of amino acids to a protein encoded therein, such as to the amino terminus of the recombinant protein. Such fusion vectors may serve one or more purposes, such as: (i) to increase expression of recombinant protein; (ii) to increase the solubility of the recombinant protein; and (iii) to aid in the purification of the recombinant protein by acting as a ligand in affinity purification. Often, in fusion expression vectors, a proteolytic cleavage site is introduced at the junction of the fusion moiety and the recombinant protein to enable separation of the recombinant protein from the fusion moiety subsequent to purification of the fusion protein. Such enzymes, and their cognate recognition sequences, include Factor Xa, thrombin and enterokinase. Example fusion expression vectors include pGEX (Pharmacia Biotech Inc; Smith and Johnson, 1988. Gene 67: 31-40), pMAL (New England Biolabs, Beverly, Mass.) and pRIT5 (Pharmacia, Piscataway, N.J.) that fuse glutathione S-transferase (GST), maltose E binding protein, or protein A, respectively, to the target recombinant protein. Examples of suitable inducible non-fusion E. coli expression vectors include pTrc (Amrann et al., (1988) Gene 69:301-315) and pET 11d (Studier et al., GENE EXPRESSION TECHNOLOGY: METHODS IN ENZYMOLOGY 185, Academic Press, San Diego, Calif. (1990) 60-89). In some embodiments, a vector is a yeast expression vector. Examples of vectors for expression in yeast Saccharomyces cerivisae include pYepSec1 (Baldari, et al., 1987. EMBO J. 6: 229-234), pMFa (Kuijan and Herskowitz, 1982. Cell 30: 933-943), pJRY88 (Schultz et al., 1987. Gene 54: 113-123), pYES2 (Invitrogen Corporation, San Diego, Calif.), and picZ (InVitrogen Corp, San Diego, Calif.). In some embodiments, a vector drives protein expression in insect cells using baculovirus expression vectors. Baculovirus vectors available for expression of proteins in cultured insect cells (e.g., SF9 cells) include the pAc series (Smith, et al., 1983. Mol. Cell. Biol. 3: 2156-2165) and the pVL series (Lucklow and Summers, 1989. Virology 170: 31-39).

[0608] In some embodiments, a vector is capable of driving expression of one or more sequences in mammalian cells using a mammalian expression vector. Examples of mammalian expression vectors include pCDM8 (Seed, 1987. Nature 329: 840) and pMT2PC (Kaufman, et al., 1987. EMBO J. 6: 187-195). When used in mammalian cells, the expression vector's control functions are typically provided by one or more regulatory elements. For example, commonly used promoters are derived from polyoma, adenovirus 2, cytomegalovirus, simian virus 40, and others disclosed herein and known in the art. For other suitable expression systems for both prokaryotic and eukaryotic cells see, e.g., Chapters 16 and 17 of Sambrook, et al., MOLECULAR CLONING: A LABORATORY MANUAL. 2nd ed., Cold Spring Harbor Laboratory, Cold Spring Harbor Laboratory Press, Cold Spring Harbor, N.Y., 1989.

[0609] In some embodiments, the recombinant mammalian expression vector is capable of directing expression of the nucleic acid preferentially in a particular cell type (e.g., tissue-specific regulatory elements are used to express the nucleic acid). Tissue-specific regulatory elements are known in the art. Non-limiting examples of suitable tissue-specific promoters include the albumin promoter (liver-specific; Pinkert, et al., 1987. Genes Dev. 1: 268-277), lymphoid-specific promoters (Calame and Eaton, 1988. Adv. Immunol. 43: 235-275), in particular promoters of T cell receptors (Winoto and Baltimore, 1989. EMBO J. 8: 729-733) and immunoglobulins (Baneiji, et al., 1983. Cell 33: 729-740; Queen and Baltimore, 1983. Cell 33: 741-748), neuron-specific promoters (e.g., the neurofilament promoter; Byrne and Ruddle, 1989. Proc. Natl. Acad. Sci. USA 86: 5473-5477), pancreas-specific promoters (Edlund, et al., 1985. Science 230: 912-916), and mammary gland-specific promoters (e.g., milk whey promoter; U.S. Pat. No. 4,873,316 and European Application Publication No. 264,166). Developmentally-regulated promoters are also encompassed, e.g., the murine hox promoters (Kessel and Gruss, 1990. Science 249: 374-379) and the α-fetoprotein promoter (Campes and Tilghman, 1989. Genes Dev. 3: 537-546). With regards to these prokaryotic and eukaryotic vectors, mention is made of U.S. Pat. No. 6,750,059, the contents of which are incorporated by reference herein in their entirety. Other embodiments of the invention may relate to the use of viral vectors, with regards to which mention is made of U.S. patent application Ser. No. 13/092,085, the contents of which are incorporated by reference herein in their entirety. Tissue-specific regulatory elements are known in the art and in this regard, mention is made of U.S. Pat. No. 7,776,321, the contents of which are incorporated by reference herein in their entirety. In some embodiments, a regulatory element is operably linked to one or more elements of a CRISPR system so as to drive expression of the one or more elements of the CRISPR system.

[0610] In some embodiments, one or more vectors driving expression of one or more elements of a nucleic acid-targeting system are introduced into a host cell such that expression of the elements of the nucleic acid-targeting system direct formation of a nucleic acid-targeting complex at one or more target sites. For example, a nucleic acid-targeting effector enzyme and a nucleic acid-targeting guide RNA could each be operably linked to separate regulatory elements on separate vectors. RNA(s) of the nucleic acid-targeting system can be delivered to a transgenic nucleic acid-targeting effector protein animal or mammal, e.g., an animal or mammal that constitutively or inducibly or conditionally expresses nucleic acid-targeting effector protein; or an animal or mammal that is otherwise expressing nucleic acid-targeting effector proteins or has cells containing nucleic acid-targeting effector proteins, such as by way of prior administration thereto of a vector or vectors that code for and express in vivo nucleic acid-targeting effector proteins. Alternatively, two or more of the elements expressed from the same or different regulatory elements, may be combined in a single vector, with one or more additional vectors providing any components of the nucleic acid-targeting system not included in the first vector. nucleic acid-targeting system elements that are combined in a single vector may be arranged in any suitable orientation, such as one element located 5′ with respect to (“upstream” of) or 3′ with respect to (“downstream” of) a second element. The coding sequence of one element may be located on the same or opposite strand of the coding sequence of a second element, and oriented in the same or opposite direction. In some embodiments, a single promoter drives expression of a transcript encoding a nucleic acid-targeting effector protein and the nucleic acid-targeting guide RNA, embedded within one or more intron sequences (e.g., each in a different intron, two or more in at least one intron, or all in a single intron). In some embodiments, the nucleic acid-targeting effector protein and the nucleic acid-targeting guide RNA may be operably linked to and expressed from the same promoter. Delivery vehicles, vectors, particles, nanoparticles, formulations and components thereof for expression of one or more elements of a nucleic acid-targeting system are as used in the foregoing documents, such as WO 2014/093622 (PCT/US2013/074667). In some embodiments, a vector comprises one or more insertion sites, such as a restriction endonuclease recognition sequence (also referred to as a “cloning site”). In some embodiments, one or more insertion sites (e.g., about or more than about 1, 2, 3, 4, 5, 6, 7, 8, 9, 10, or more insertion sites) are located upstream and/or downstream of one or more sequence elements of one or more vectors. When multiple different guide sequences are used, a single expression construct may be used to target nucleic acid-targeting activity to multiple different, corresponding target sequences within a cell. For example, a single vector may comprise about or more than about 1, 2, 3, 4, 5, 6, 7, 8, 9, 10, 15, 20, or more guide sequences. In some embodiments, about or more than about 1, 2, 3, 4, 5, 6, 7, 8, 9, 10, or more such guide-sequence-containing vectors may be provided, and optionally delivered to a cell. In some embodiments, a vector comprises a regulatory element operably linked to an enzyme-coding sequence encoding a nucleic acid-targeting effector protein. Nucleic acid-targeting effector protein or nucleic acid-targeting guide RNA or RNA(s) can be delivered separately; and advantageously at least one of these is delivered via a particle complex. nucleic acid-targeting effector protein mRNA can be delivered prior to the nucleic acid-targeting guide RNA to give time for nucleic acid-targeting effector protein to be expressed. Nucleic acid-targeting effector protein mRNA might be administered 1-12 hours (preferably around 2-6 hours) prior to the administration of nucleic acid-targeting guide RNA. Alternatively, nucleic acid-targeting effector protein mRNA and nucleic acid-targeting guide RNA can be administered together. Advantageously, a second booster dose of guide RNA can be administered 1-12 hours (preferably around 2-6 hours) after the initial administration of nucleic acid-targeting effector protein mRNA+guide RNA. Additional administrations of nucleic acid-targeting effector protein mRNA and/or guide RNA might be useful to achieve the most efficient levels of genome modification.

### Dosage of Vectors

[0611] In some embodiments, the vector, e.g., plasmid or viral vector is delivered to the tissue of interest by, for example, an intramuscular injection, while other times the delivery is via intravenous, transdermal, intranasal, oral, mucosal, or other delivery methods. Such delivery may be either via a single dose, or multiple doses. One skilled in the art understands that the actual dosage to be delivered herein may vary greatly depending upon a variety of factors, such as the vector choice, the target cell, organism, or tissue, the general condition of the subject to be treated, the degree of transformation/modification sought, the administration route, the administration mode, the type of transformation/modification sought, etc.

[0612] Such a dosage may further contain, for example, a carrier (water, saline, ethanol, glycerol, lactose, sucrose, calcium phosphate, gelatin, dextran, agar, pectin, peanut oil, sesame oil, etc.), a diluent, a pharmaceutically-acceptable carrier (e.g., phosphate-buffered saline), a pharmaceutically-acceptable excipient, and/or other compounds known in the art. The dosage may further contain one or more pharmaceutically acceptable salts such as, for example, a mineral acid salt such as a hydrochloride, a hydrobromide, a phosphate, a sulfate, etc.; and the salts of organic acids such as acetates, propionates, malonates, benzoates, etc. Additionally, auxiliary substances, such as wetting or emulsifying agents, pH buffering substances, gels or gelling materials, flavorings, colorants, microspheres, polymers, suspension agents, etc. may also be present herein. In addition, one or more other conventional pharmaceutical ingredients, such as preservatives, humectants, suspending agents, surfactants, antioxidants, anticaking agents, fillers, chelating agents, coating agents, chemical stabilizers, etc. may also be present, especially if the dosage form is a reconstitutable form. Suitable exemplary ingredients include microcrystalline cellulose, carboxymethylcellulose sodium, polysorbate 80, phenylethyl alcohol, chlorobutanol, potassium sorbate, sorbic acid, sulfur dioxide, propyl gallate, the parabens, ethyl vanillin, glycerin, phenol, parachlorophenol, gelatin, albumin and a combination thereof. A thorough discussion of pharmaceutically acceptable excipients is available in REMINGTON'S PHARMACEUTICAL SCIENCES (Mack Pub. Co., N.J. 1991) which is incorporated by reference herein.

[0613] In an embodiment herein the delivery is via an adenovirus, which may be at a single booster dose containing at least 1×10⁵ particles (also referred to as particle units, pu) of adenoviral vector. In an embodiment herein, the dose preferably is at least about 1×10⁶ particles (for example, about 1×10⁶-1×10¹² particles), more preferably at least about 1×10⁷ particles, more preferably at least about 1×10⁸ particles (e.g., about 1×10⁸-1×10¹¹ particles or about 1×10⁸-1×10¹² particles), and most preferably at least about 1×10⁹ particles (e.g., about 1×10⁹-1×10¹⁰ particles or about 1×10⁹-1×10¹² particles), or even at least about 1×10¹⁰ particles (e.g., about 1×10¹⁰-1×10¹² particles) of the adenoviral vector. Alternatively, the dose comprises no more than about 1×10¹⁴ particles, preferably no more than about 1×10¹³ particles, even more preferably no more than about 1×10¹² particles, even more preferably no more than about 1×10¹¹ particles, and most preferably no more than about 1×10¹⁰ particles (e.g., no more than about 1×10⁹ articles). Thus, the dose may contain a single dose of adenoviral vector with, for example, about 1×10⁶ particle units (pu), about 2×10⁶ pu, about 4×10⁶ pu, about 1×10⁷ pu, about 2×10⁷ pu, about 4×10⁷ pu, about 1×10⁸ pu, about 2×10⁸ pu, about 4×10⁸ pu, about 1×10⁹ pu, about 2×10⁹ pu, about 4×10⁹ pu, about 1×10¹⁰ pu, about 2×10¹⁰ pu, about 4×10¹⁰ pu, about 1×10¹¹ pu, about 2×10¹¹ pu, about 4×10¹¹ pu, about 1×10¹² pu, about 2×10¹² pu, or about 4×10¹² pu of adenoviral vector. See, for example, the adenoviral vectors in U.S. Pat. No. 8,454,972 B2 to Nabel, et. al., granted on Jun. 4, 2013; incorporated by reference herein, and the dosages at col 29, lines 36-58 thereof. In an embodiment herein, the adenovirus is delivered via multiple doses.

[0614] In an embodiment herein, the delivery is via an AAV. A therapeutically effective dosage for in vivo delivery of the AAV to a human is believed to be in the range of from about 20 to about 50 ml of saline solution containing from about 1×10¹⁰ to about 1×10¹⁰ functional AAV/ml solution. The dosage may be adjusted to balance the therapeutic benefit against any side effects. In an embodiment herein, the AAV dose is generally in the range of concentrations of from about 1×10⁵ to 1×10⁵⁰ genomes AAV, from about 1×10⁸ to 1×10²⁰ genomes AAV, from about 1×10¹⁰ to about 1×10¹⁶ genomes, or about 1×10¹¹ to about 1×10¹⁶ genomes AAV. A human dosage may be about 1×10¹³ genomes AAV. Such concentrations may be delivered in from about 0.001 ml to about 100 ml, about 0.05 to about 50 ml, or about 10 to about 25 ml of a carrier solution. Other effective dosages can be readily established by one of ordinary skill in the art through routine trials establishing dose response curves. See, for example, U.S. Pat. No. 8,404,658 B2 to Hajjar, et al., granted on Mar. 26, 2013, at col. 27, lines 45-60.

[0615] In an embodiment herein the delivery is via a plasmid. In such plasmid compositions, the dosage should be a sufficient amount of plasmid to elicit a response. For instance, suitable quantities of plasmid DNA in plasmid compositions can be from about 0.1 to about 2 mg, or from about 1 μg to about 10 μg per 70 kg individual. Plasmids of the invention will generally comprise (i) a promoter; (ii) a sequence encoding a CRISPR-Cas protein, operably linked to said promoter; (iii) a selectable marker; (iv) an origin of replication; and (v) a transcription terminator downstream of and operably linked to (ii). The plasmid can also encode the RNA components of a CRISPR complex, but one or more of these may instead be encoded on a different vector.

[0616] The doses herein are based on an average 70 kg individual. The frequency of administration is within the ambit of the medical or veterinary practitioner (e.g., physician, veterinarian), or scientist skilled in the art. It is also noted that mice used in experiments are typically about 20 g and from mice experiments one can scale up to a 70 kg individual.

[0617] The dosage used for the compositions provided herein include dosages for repeated administration or repeat dosing. In particular embodiments, the administration is repeated within a period of several weeks, months, or years. Suitable assays can be performed to obtain an optimal dosage regime. Repeated administration can allow the use of lower dosage, which can positively affect off-target modifications.

### Example Delivery Approaches

[0618] Conventional viral and non-viral based gene transfer methods can be used to introduce nucleic acids in mammalian cells or target tissues. Such methods can be used to administer nucleic acids encoding components of a nucleic acid-targeting system to cells in culture, or in a host organism. Non-viral vector delivery systems include DNA plasmids, RNA (e.g. a transcript of a vector described herein), naked nucleic acid, and nucleic acid complexed with a delivery vehicle, such as a liposome. Viral vector delivery systems include DNA and RNA viruses, which have either episomal or integrated genomes after delivery to the cell. For a review of gene therapy procedures, see Anderson, Science 256:808-813 (1992); Nabel & Felgner, TIBTECH 11:211-217 (1993); Mitani & Caskey, TIBTECH 11:162-166 (1993); Dillon, TIBTECH 11:167-175 (1993); Miller, Nature 357:455-460 (1992); Van Brunt, Biotechnology 6(10):1149-1154 (1988); Vigne, Restorative Neurology and Neuroscience 8:35-36 (1995); Kremer & Perricaudet, British Medical Bulletin 51(1):31-44 (1995); Haddada et al., in Current Topics in Microbiology and Immunology, Doerfler and Bohm (eds) (1995); and Yu et al., Gene Therapy 1:13-26 (1994).

Methods of non-viral delivery of nucleic acids include lipofection, nucleofection, microinjection, biolistics, virosomes, liposomes, immunoliposomes, polycation or lipid:nucleic acid conjugates, naked DNA, artificial virions, and agent-enhanced uptake of DNA. Lipofection is described in e.g., U.S. Pat. Nos. 5,049,386, 4,946,787; and 4,897,355) and lipofection reagents are sold commercially (e.g., Transfectam™ and Lipofectin™) Cationic and neutral lipids that are suitable for efficient receptor-recognition lipofection of polynucleotides include those of Felgner, WO 91/17424; WO 91/16024. Delivery can be to cells (e.g. in vitro or ex vivo administration) or target tissues (e.g. in vivo administration).

[0619] Plasmid delivery involves the cloning of a guide RNA into a CRISPR-Cas protein expressing plasmid and transfecting the DNA in cell culture. Plasmid backbones are available commercially and no specific equipment is required. They have the advantage of being modular, capable of carrying different sizes of CRISPR-Cas coding sequences (including those encoding larger sized proteins) as well as selection markers. Both an advantage of plasmids is that they can ensure transient, but sustained expression. However, delivery of plasmids is not straightforward such that in vivo efficiency is often low. The sustained expression can also be disadvantageous in that it can increase off-target editing. In addition excess build-up of the CRISPR-Cas protein can be toxic to the cells. Finally, plasmids always hold the risk of random integration of the dsDNA in the host genome, more particularly in view of the double-stranded breaks being generated (on and off-target).

[0620] The preparation of lipid:nucleic acid complexes, including targeted liposomes such as immunolipid complexes, is well known to one of skill in the art (see, e.g., Crystal, Science 270:404-410 (1995); Blaese et al., Cancer Gene Ther. 2:291-297 (1995); Behr et al., Bioconjugate Chem. 5:382-389 (1994); Remy et al., Bioconjugate Chem. 5:647-654 (1994); Gao et al., Gene Therapy 2:710-722 (1995); Ahmad et al., Cancer Res. 52:4817-4820 (1992); U.S. Pat. Nos. 4,186,183, 4,217,344, 4,235,871, 4,261,975, 4,485,054, 4,501,728, 4,774,085, 4,837,028, and 4,946,787). This is discussed more in detail below.

[0621] The use of RNA or DNA viral based systems for the delivery of nucleic acids takes advantage of highly evolved processes for targeting a virus to specific cells in the body and trafficking the viral payload to the nucleus. Viral vectors can be administered directly to patients (in vivo) or they can be used to treat cells in vitro, and the modified cells may optionally be administered to patients (ex vivo). Conventional viral based systems could include retroviral, lentivirus, adenoviral, adeno-associated and herpes simplex virus vectors for gene transfer. Integration in the host genome is possible with the retrovirus, lentivirus, and adeno-associated virus gene transfer methods, often resulting in long term expression of the inserted transgene. Additionally, high transduction efficiencies have been observed in many different cell types and target tissues.

[0622] The tropism of a retrovirus can be altered by incorporating foreign envelope proteins, expanding the potential target population of target cells. Lentiviral vectors are retroviral vectors that are able to transduce or infect non-dividing cells and typically produce high viral titers. Selection of a retroviral gene transfer system would therefore depend on the target tissue. Retroviral vectors are comprised of cis-acting long terminal repeats with packaging capacity for up to 6-10 kb of foreign sequence. The minimum cis-acting LTRs are sufficient for replication and packaging of the vectors, which are then used to integrate the therapeutic gene into the target cell to provide permanent transgene expression. Widely used retroviral vectors include those based upon murine leukemia virus (MuLV), gibbon ape leukemia virus (GaLV), Simian Immuno deficiency virus (SIV), human immuno deficiency virus (HIV), and combinations thereof (see, e.g., Buchscher et al., J. Virol. 66:2731-2739 (1992); Johann et al., J. Virol. 66:1635-1640 (1992); Sommnerfelt et al., Virol. 176:58-59 (1990); Wilson et al., J. Virol. 63:2374-2378 (1989); Miller et al., J. Virol. 65:2220-2224 (1991); PCT/US94/05700).

[0623] In applications where transient expression is preferred, adenoviral based systems may be used. Adenoviral based vectors are capable of very high transduction efficiency in many cell types and do not require cell division. With such vectors, high titer and levels of expression have been obtained. This vector can be produced in large quantities in a relatively simple system. Adeno-associated virus (“AAV”) vectors may also be used to transduce cells with target nucleic acids, e.g., in the in vitro production of nucleic acids and peptides, and for in vivo and ex vivo gene therapy procedures (see, e.g., West et al., Virology 160:38-47 (1987); U.S. Pat. No. 4,797,368; WO 93/24641; Kotin, Human Gene Therapy 5:793-801 (1994); Muzyczka, J. Clin. Invest. 94:1351 (1994). Construction of recombinant AAV vectors are described in a number of publications, including U.S. Pat. No. 5,173,414; Tratschin et al., Mol. Cell. Biol. 5:3251-3260 (1985); Tratschin, et al., Mol. Cell. Biol. 4:2072-2081 (1984); Hermonat & Muzyczka, PNAS 81:6466-6470 (1984); and Samulski et al., J. Virol. 63:03822-3828 (1989).

[0624] The invention provides AAV that contains or consists essentially of an exogenous nucleic acid molecule encoding a CRISPR system, e.g., a plurality of cassettes comprising or consisting a first cassette comprising or consisting essentially of a promoter, a nucleic acid molecule encoding a CRISPR-associated (Cas) protein (putative nuclease or helicase proteins), e.g., Cas13 and a terminator, and one or more, advantageously up to the packaging size limit of the vector, e.g., in total (including the first cassette) five, cassettes comprising or consisting essentially of a promoter, nucleic acid molecule encoding guide RNA (gRNA) and a terminator (e.g., each cassette schematically represented as Promoter-gRNA1-terminator, Promoter-gRNA2-terminator . . . Promoter-gRNA(N)-terminator, where N is a number that can be inserted that is at an upper limit of the packaging size limit of the vector), or two or more individual rAAVs, each containing one or more than one cassette of a CRISPR system, e.g., a first rAAV containing the first cassette comprising or consisting essentially of a promoter, a nucleic acid molecule encoding Cas, e.g., Cas (Cas13) and a terminator, and a second rAAV containing one or more cassettes each comprising or consisting essentially of a promoter, nucleic acid molecule encoding guide RNA (gRNA) and a terminator (e.g., each cassette schematically represented as Promoter-gRNA1-terminator, Promoter-gRNA2-terminator . . . Promoter-gRNA(N)-terminator, where N is a number that can be inserted that is at an upper limit of the packaging size limit of the vector). Alternatively, because Cas13 can process its own crRNA/gRNA, a single crRNA/gRNA array can be used for multiplex gene editing. Hence, instead of including multiple cassettes to deliver the gRNAs, the rAAV may contain a single cassette comprising or consisting essentially of a promoter, a plurality of crRNA/gRNA, and a terminator (e.g., schematically represented as Promoter-gRNA1-gRNA2 . . . gRNA(N)-terminator, where N is a number that can be inserted that is at an upper limit of the packaging size limit of the vector). See Zetsche et al Nature Biotechnology 35, 31-34 (2017), which is incorporated herein by reference in its entirety. As rAAV is a DNA virus, the nucleic acid molecules in the herein discussion concerning AAV or rAAV are advantageously DNA. The promoter is in some embodiments advantageously human Synapsin I promoter (hSyn). Additional methods for the delivery of nucleic acids to cells are known to those skilled in the art. See, for example, US20030087817, incorporated herein by reference.

[0625] In another embodiment, Cocal vesiculovirus envelope pseudotyped retroviral vector particles are contemplated (see, e.g., US Patent Publication No. 20120164118 assigned to the Fred Hutchinson Cancer Research Center). Cocal virus is in the Vesiculovirus genus, and is a causative agent of vesicular stomatitis in mammals. Cocal virus was originally isolated from mites in Trinidad (Jonkers et al., Am. J. Vet. Res. 25:236-242 (1964)), and infections have been identified in Trinidad, Brazil, and Argentina from insects, cattle, and horses. Many of the vesiculoviruses that infect mammals have been isolated from naturally infected arthropods, suggesting that they are vector-borne. Antibodies to vesiculoviruses are common among people living in rural areas where the viruses are endemic and laboratory-acquired; infections in humans usually result in influenza-like symptoms. The Cocal virus envelope glycoprotein shares 71.5% identity at the amino acid level with VSV-G Indiana, and phylogenetic comparison of the envelope gene of vesiculoviruses shows that Cocal virus is serologically distinct from, but most closely related to, VSV-G Indiana strains among the vesiculoviruses. Jonkers et al., Am. J. Vet. Res. 25:236-242 (1964) and Travassos da Rosa et al., Am. J. Tropical Med. & Hygiene 33:999-1006 (1984). The Cocal vesiculovirus envelope pseudotyped retroviral vector particles may include for example, lentiviral, alpharetroviral, betaretroviral, gammaretroviral, deltaretroviral, and epsilonretroviral vector particles that may comprise retroviral Gag, Pol, and/or one or more accessory protein(s) and a Cocal vesiculovirus envelope protein. Within certain aspects of these embodiments, the Gag, Pol, and accessory proteins are lentiviral and/or gammaretroviral.

[0626] In some embodiments, a host cell is transiently or non-transiently transfected with one or more vectors described herein. In some embodiments, a cell is transfected as it naturally occurs in a subject optionally to be reintroduced therein. In some embodiments, a cell that is transfected is taken from a subject. In some embodiments, the cell is derived from cells taken from a subject, such as a cell line. A wide variety of cell lines for tissue culture are known in the art. Examples of cell lines include, but are not limited to, C8161, CCRF-CEM, MOLT, mIMCD-3, NHDF, HeLa-S3, Huh1, Huh4, Huh7, HUVEC, HASMC, HEKn, HEKa, MiaPaCell, Panc1, PC-3, TF1, CTLL-2, C1R, Rat6, CV1, RPTE, A10, T24, J82, A375, ARH-77, Calul, SW480, SW620, SKOV3, SK-UT, CaCo2, P388D1, SEM-K2, WEHI-231, HB56, TIB55, Jurkat, J45.01, LRMB, Bcl-1, BC-3, IC21, DLD2, Raw264.7, NRK, NRK-52E, MRC5, MEF, Hep G2, HeLa B, HeLa T4, COS, COS-1, COS-6, COS-M6A, BS-C-1 monkey kidney epithelial, BALB/3T3 mouse embryo fibroblast, 3T3 Swiss, 3T3-L1, 132-d5 human fetal fibroblasts; 10.1 mouse fibroblasts, 293-T, 3T3, 721, 9L, A2780, A2780ADR, A2780cis, A172, A20, A253, A431, A-549, ALC, B16, B35, BCP-1 cells, BEAS-2B, bEnd.3, BHK-21, BR 293, BxPC3, C3H-10T1/2, C6/36, Cal-27, CHO, CHO-7, CHO-IR, CHO-K1, CHO-K2, CHO-T, CHO Dhfr −/−, COR-L23, COR-L23/CPR, COR-L23/5010, COR-L23/R23, COS-7, COV-434, CML T1, CMT, CT26, D17, DH82, DU145, DuCaP, EL4, EM2, EM3, EMT6/AR1, EMT6/AR10.0, FM3, H1299, H69, HB54, HB55, HCA2, HEK-293, HeLa, Hepa1c1c7, HL-60, HMEC, HT-29, Jurkat, JY cells, K562 cells, Ku812, KCL22, KG1, KYO1, LNCap, Ma-Mel 1-48, MC-38, MCF-7, MCF-10A, MDA-MB-231, MDA-MB-468, MDA-MB-435, MDCK II, MDCK II, MOR/0.2R, MONO-MAC 6, MTD-1A, MyEnd, NCI-H69/CPR, NCI-H69/LX10, NCI-H69/LX20, NCI-H69/LX4, NIH-3T3, NALM-1, NW-145, OPCN/OPCT cell lines, Peer, PNT-1A/PNT 2, RenCa, RIN-5F, RMA/RMAS, Saos-2 cells, Sf-9, SkBr3, T2, T-47D, T84, THP1 cell line, U373, U87, U937, VCaP, Vero cells, WM39, WT-49, X63, YAC-1, YAR, and transgenic varieties thereof. Cell lines are available from a variety of sources known to those with skill in the art (see, e.g., the American Type Culture Collection (ATCC) (Manassas, Va.)).

[0627] In particular embodiments, transient expression and/or presence of one or more of the components of the AD-functionalized CRISPR system can be of interest, such as to reduce off-target effects. In some embodiments, a cell transfected with one or more vectors described herein is used to establish a new cell line comprising one or more vector-derived sequences. In some embodiments, a cell transiently transfected with the components of an AD-functionalized CRISPR system as described herein (such as by transient transfection of one or more vectors, or transfection with RNA), and modified through the activity of a CRISPR complex, is used to establish a new cell line comprising cells containing the modification but lacking any other exogenous sequence. In some embodiments, cells transiently or non-transiently transfected with one or more vectors described herein, or cell lines derived from such cells are used in assessing one or more test compounds.

[0628] In some embodiments it is envisaged to introduce the RNA and/or protein directly to the host cell. For instance, the CRISPR-Cas protein can be delivered as encoding mRNA together with an in vitro transcribed guide RNA. Such methods can reduce the time to ensure effect of the CRISPR-Cas protein and further prevents long-term expression of the CRISPR system components.

[0629] In some embodiments the RNA molecules of the invention are delivered in liposome or lipofectin formulations and the like and can be prepared by methods well known to those skilled in the art. Such methods are described, for example, in U.S. Pat. Nos. 5,593,972, 5,589,466, and 5,580,859, which are herein incorporated by reference. Delivery systems aimed specifically at the enhanced and improved delivery of siRNA into mammalian cells have been developed, (see, for example, Shen et al FEBS Let. 2003, 539:111-114; Xia et al., Nat. Biotech. 2002, 20:1006-1010; Reich et al., Mol. Vision. 2003, 9: 210-216; Sorensen et al., J. Mol. Biol. 2003, 327: 761-766; Lewis et al., Nat. Gen. 2002, 32: 107-108 and Simeoni et al., NAR 2003, 31, 11: 2717-2724) and may be applied to the present invention. siRNA has recently been successfully used for inhibition of gene expression in primates (see for example. Tolentino et al., Retina 24(4):660 which may also be applied to the present invention.

[0630] Indeed, RNA delivery is a useful method of in vivo delivery. It is possible to deliver Cas13, nucleotide deaminase, and guide RNA into cells using liposomes or nanoparticles. Thus delivery of the CRISPR-Cas protein, such as a Cas13, the delivery of the nucleotide deaminase (which may be fused to the CRISPR-Cas protein or an adaptor protein), and/or delivery of the RNAs of the invention may be in RNA form and via microvesicles, liposomes or particle or particles. For example, Cas13 mRNA, nucleotide deaminase mRNA, and guide RNA can be packaged into liposomal particles for delivery in vivo. Liposomal transfection reagents such as lipofectamine from Life Technologies and other reagents on the market can effectively deliver RNA molecules into the liver.

[0631] Means of delivery of RNA also preferred include delivery of RNA via particles (Cho, S., Goldberg, M., Son, S., Xu, Q., Yang, F., Mei, Y., Bogatyrev, S., Langer, R. and Anderson, D., Lipid-like nanoparticles for small interfering RNA delivery to endothelial cells, Advanced Functional Materials, 19: 3112-3118, 2010) or exosomes (Schroeder, A., Levins, C., Cortez, C., Langer, R., and Anderson, D., Lipid-based nanotherapeutics for siRNA delivery, Journal of Internal Medicine, 267: 9-21, 2010, PMID: 20059641). Indeed, exosomes have been shown to be particularly useful in delivery siRNA, a system with some parallels to the CRISPR system. For instance, El-Andaloussi S, et al. (“Exosome-mediated delivery of siRNA in vitro and in vivo.” Nat Protoc. 2012 December; 7(12):2112-26. doi: 10.1038/nprot.2012.131. Epub 2012 Nov. 15.) describe how exosomes are promising tools for drug delivery across different biological barriers and can be harnessed for delivery of siRNA in vitro and in vivo. Their approach is to generate targeted exosomes through transfection of an expression vector, comprising an exosomal protein fused with a peptide ligand. The exosomes are then purify and characterized from transfected cell supernatant, then RNA is loaded into the exosomes. Delivery or administration according to the invention can be performed with exosomes, in particular but not limited to the brain. Vitamin E (α-tocopherol) may be conjugated with CRISPR Cas and delivered to the brain along with high density lipoprotein (HDL), for example in a similar manner as was done by Uno et al. (HUMAN GENE THERAPY 22:711-719 (June 2011)) for delivering short-interfering RNA (siRNA) to the brain. Mice were infused via Osmotic minipumps (model 1007D; Alzet, Cupertino, Calif.) filled with phosphate-buffered saline (PBS) or free TocsiBACE or Toc-siBACE/HDL and connected with Brain Infusion Kit 3 (Alzet). A brain-infusion cannula was placed about 0.5 mm posterior to the bregma at midline for infusion into the dorsal third ventricle. Uno et al. found that as little as 3 nmol of Toc-siRNA with HDL could induce a target reduction in comparable degree by the same ICV infusion method. A similar dosage of CRISPR Cas conjugated to α-tocopherol and co-administered with HDL targeted to the brain may be contemplated for humans in the present invention, for example, about 3 nmol to about 3 μmol of CRISPR Cas targeted to the brain may be contemplated. Zou et al. ((HUMAN GENE THERAPY 22:465-475 (April 2011)) describes a method of lentiviral-mediated delivery of short-hairpin RNAs targeting PKCγ for in vivo gene silencing in the spinal cord of rats. Zou et al. administered about 10 μl of a recombinant lentivirus having a titer of 1×10⁹ transducing units (TU)/ml by an intrathecal catheter. A similar dosage of CRISPR Cas expressed in a lentiviral vector targeted to the brain may be contemplated for humans in the present invention, for example, about 10-50 ml of CRISPR Cas targeted to the brain in a lentivirus having a titer of 1×10⁹ transducing units (TU)/ml may be contemplated.

### RNA Delivery

[0632] In particular embodiments, RNA based delivery is used. In these embodiments, mRNA of the CRISPR-Cas protein, mRNA of the nucleotide deaminase (which may be fused to a CRISPR-Cas protein or an adaptor), are delivered together with in vitro transcribed guide RNA. Liang et al. describes efficient genome editing using RNA based delivery (Protein Cell. 2015 May; 6(5): 363-372). In some embodiments, the mRNA(s) encoding Cas13 and/or nucleotide deaminase can be chemically modified, which may lead to improved activity compared to plasmid-encoded Cas13 and/or nucleotide deaminase. For example, uridines in the mRNA(s) can be partially or fully substituted with pseudouridine (P), N1-methylpseudouridine (me1T), 5-methoxyuridine(5moU). See Li et al., Nature Biomedical Engineering 1, 0066 DOI:10.1038/s41551-017-0066 (2017), which is incorporated herein by reference in its entirety.

### RNP Delivery

[0633] In some embodiments, the system may comprise a particle delivery system comprising a ribonucleoprotein complex. One or more components in the system may be encapsulated within or otherwise attached to the delivery particle. The particle may further comprising a tissue-specific, cell-specific, and/or cell compartment-specific targeting molecule.

[0634] In particular embodiments, pre-complexed guide RNA, CRISPR-Cas protein, and nucleotide deaminase (which may be fused to a CRISPR-Cas protein or an adaptor) are delivered as a ribonucleoprotein (RNP). RNPs have the advantage that they lead to rapid editing effects even more so than the RNA method because this process avoids the need for transcription. An important advantage is that both RNP delivery is transient, reducing off-target effects and toxicity issues. Efficient genome editing in different cell types has been observed by Kim et al. (2014, Genome Res. 24(6):1012-9), Paix et al. (2015, Genetics 204(1):47-54), Chu et al. (2016, BMC Biotechnol. 16:4), and Wang et al. (2013, Cell. 9; 153(4):910-8).

[0635] In particular embodiments, the ribonucleoprotein is delivered by way of a polypeptide-based shuttle agent as described in WO2016161516. WO2016161516 describes efficient transduction of polypeptide cargos using synthetic peptides comprising an endosome leakage domain (ELD) operably linked to a cell penetrating domain (CPD), to a histidine-rich domain and a CPD. Similarly these polypeptides can be used for the delivery of CRISPR-effector based RNPs in eukaryotic cells.

### Particles

[0636] In some aspects or embodiments, a composition comprising a delivery particle formulation may be used. In some aspects or embodiments, the formulation comprises a CRISPR complex, the complex comprising a CRISPR protein and a guide which directs sequence-specific binding of the CRISPR complex to a target sequence. In some embodiments, the delivery particle comprises a lipid-based particle, optionally a lipid nanoparticle, or cationic lipid and optionally biodegradable polymer. In some embodiments, the cationic lipid comprises 1,2-dioleoyl-3-trimethylammonium-propane (DOTAP). In some embodiments, the hydrophilic polymer comprises ethylene glycol or polyethylene glycol. In some embodiments, the delivery particle further comprises a lipoprotein, preferably cholesterol. In some embodiments, the delivery particles are less than 500 nm in diameter, optionally less than 250 nm in diameter, optionally less than 100 nm in diameter, optionally about 35 nm to about 60 nm in diameter.

[0637] Example particle delivery complexes are further disclosed in U.S. Provisional Application entitled “Nove Delivery of Large Payloads” filed 62/485,625 filed Apr. 14, 2017.

[0638] Several types of particle delivery systems and/or formulations are known to be useful in a diverse spectrum of biomedical applications. In general, a particle is defined as a small object that behaves as a whole unit with respect to its transport and properties. Particles are further classified according to diameter. Coarse particles cover a range between 2,500 and 10,000 nanometers. Fine particles are sized between 100 and 2,500 nanometers. Ultrafine particles, or nanoparticles, are generally between 1 and 100 nanometers in size. The basis of the 100-nm limit is the fact that novel properties that differentiate particles from the bulk material typically develop at a critical length scale of under 100 nm.

[0639] As used herein, a particle delivery system/formulation is defined as any biological delivery system/formulation which includes a particle in accordance with the present invention. A particle in accordance with the present invention is any entity having a greatest dimension (e.g. diameter) of less than 100 microns (μm). In some embodiments, inventive particles have a greatest dimension of less than 10μ m. In some embodiments, inventive particles have a greatest dimension of less than 2000 nanometers (nm). In some embodiments, inventive particles have a greatest dimension of less than 1000 nanometers (nm). In some embodiments, inventive particles have a greatest dimension of less than 900 nm, 800 nm, 700 nm, 600 nm, 500 nm, 400 nm, 300 nm, 200 nm, or 100 nm. Typically, inventive particles have a greatest dimension (e.g., diameter) of 500 nm or less. In some embodiments, inventive particles have a greatest dimension (e.g., diameter) of 250 nm or less. In some embodiments, inventive particles have a greatest dimension (e.g., diameter) of 200 nm or less. In some embodiments, inventive particles have a greatest dimension (e.g., diameter) of 150 nm or less. In some embodiments, inventive particles have a greatest dimension (e.g., diameter) of 100 nm or less. Smaller particles, e.g., having a greatest dimension of 50 nm or less are used in some embodiments of the invention. In some embodiments, inventive particles have a greatest dimension ranging between 25 nm and 200 nm.

[0640] In terms of this invention, it is preferred to have one or more components of CRISPR complex, e.g., CRISPR-Cas protein or mRNA, or nucleotide deaminase (which may be fused to a CRISPR-Cas protein or an adaptor) or mRNA, or guide RNA delivered using nanoparticles or lipid envelopes. Other delivery systems or vectors are may be used in conjunction with the nanoparticle aspects of the invention.

[0641] In general, a “nanoparticle” refers to any particle having a diameter of less than 1000 nm. In certain preferred embodiments, nanoparticles of the invention have a greatest dimension (e.g., diameter) of 500 nm or less. In other preferred embodiments, nanoparticles of the invention have a greatest dimension ranging between 25 nm and 200 nm. In other preferred embodiments, nanoparticles of the invention have a greatest dimension of 100 nm or less. In other preferred embodiments, nanoparticles of the invention have a greatest dimension ranging between 35 nm and 60 nm. It will be appreciated that reference made herein to particles or nanoparticles can be interchangeable, where appropriate.

[0642] It will be understood that the size of the particle will differ depending as to whether it is measured before or after loading. Accordingly, in particular embodiments, the term “nanoparticles” may apply only to the particles pre loading.

[0643] Nanoparticles encompassed in the present invention may be provided in different forms, e.g., as solid nanoparticles (e.g., metal such as silver, gold, iron, titanium), non-metal, lipid-based solids, polymers), suspensions of nanoparticles, or combinations thereof. Metal, dielectric, and semiconductor nanoparticles may be prepared, as well as hybrid structures (e.g., core-shell nanoparticles). Nanoparticles made of semiconducting material may also be labeled quantum dots if they are small enough (typically sub 10 nm) that quantization of electronic energy levels occurs. Such nanoscale particles are used in biomedical applications as drug carriers or imaging agents and may be adapted for similar purposes in the present invention.

[0644] Semi-solid and soft nanoparticles have been manufactured, and are within the scope of the present invention. A prototype nanoparticle of semi-solid nature is the liposome. Various types of liposome nanoparticles are currently used clinically as delivery systems for anticancer drugs and vaccines. Nanoparticles with one half hydrophilic and the other half hydrophobic are termed Janus particles and are particularly effective for stabilizing emulsions. They can self-assemble at water/oil interfaces and act as solid surfactants.

[0645] Particle characterization (including e.g., characterizing morphology, dimension, etc.) is done using a variety of different techniques. Common techniques are electron microscopy (TEM, SEM), atomic force microscopy (AFM), dynamic light scattering (DLS), X-ray photoelectron spectroscopy (XPS), powder X-ray diffraction (XRD), Fourier transform infrared spectroscopy (FTIR), matrix-assisted laser desorption/ionization time-of-flight mass spectrometry(MALDI-TOF), ultraviolet-visible spectroscopy, dual polarization interferometry and nuclear magnetic resonance (NMR). Characterization (dimension measurements) may be made as to native particles (i.e., preloading) or after loading of the cargo (herein cargo refers to e.g., one or more components of CRISPR-Cas system e.g., CRISPR-Cas protein or mRNA, nucleotide deaminase (which may be fused to a CRISPR-Cas protein or an adaptor) or mRNA, or guide RNA, or any combination thereof, and may include additional carriers and/or excipients) to provide particles of an optimal size for delivery for any in vitro, ex vivo and/or in vivo application of the present invention. In certain preferred embodiments, particle dimension (e.g., diameter) characterization is based on measurements using dynamic laser scattering (DLS). Mention is made of U.S. Pat. Nos. 8,709,843; 6,007,845; 5,855,913; 5,985,309; 5,543,158; and the publication by James E. Dahlman and Carmen Barnes et al. Nature Nanotechnology (2014) published online 11 May 2014, doi:10.1038/nnano.2014.84, concerning particles, methods of making and using them and measurements thereof.

[0646] Particles delivery systems within the scope of the present invention may be provided in any form, including but not limited to solid, semi-solid, emulsion, or colloidal particles. As such any of the delivery systems described herein, including but not limited to, e.g., lipid-based systems, liposomes, micelles, microvesicles, exosomes, or gene gun may be provided as particle delivery systems within the scope of the present invention.

[0647] CRISPR-Cas protein mRNA, nucleotide deaminase (which may be fused to a CRISPR-Cas protein or an adaptor) or mRNA, and guide RNA may be delivered simultaneously using particles or lipid envelopes; for instance, CRISPR-Cas protein and RNA of the invention, e.g., as a complex, can be delivered via a particle as in Dahlman et al., WO2015089419 A2 and documents cited therein, such as 7C1 (see, e.g., James E. Dahlman and Carmen Barnes et al. Nature Nanotechnology (2014) published online 11 May 2014, doi:10.1038/nnano.2014.84), e.g., delivery particle comprising lipid or lipidoid and hydrophilic polymer, e.g., cationic lipid and hydrophilic polymer, for instance wherein the cationic lipid comprises 1,2-dioleoyl-3-trimethylammonium-propane (DOTAP) or 1,2-ditetradecanoyl-sn-glycero-3-phosphocholine (DMPC) and/or wherein the hydrophilic polymer comprises ethylene glycol or polyethylene glycol (PEG); and/or wherein the particle further comprises cholesterol (e.g., particle from formulation 1=DOTAP 100, DMPC 0, PEG 0, Cholesterol 0; formulation number 2=DOTAP 90, DMPC 0, PEG 10, Cholesterol 0; formulation number 3=DOTAP 90, DMPC 0, PEG 5, Cholesterol 5), wherein particles are formed using an efficient, multistep process wherein first, effector protein and RNA are mixed together, e.g., at a 1:1 molar ratio, e.g., at room temperature, e.g., for 30 minutes, e.g., in sterile, nuclease free 1×PBS; and separately, DOTAP, DMPC, PEG, and cholesterol as applicable for the formulation are dissolved in alcohol, e.g., 100% ethanol; and, the two solutions are mixed together to form particles containing the complexes).

[0648] Nucleic acid-targeting effector proteins (e.g., a Type V protein such as Cas13) mRNA and guide RNA may be delivered simultaneously using particles or lipid envelopes. Examples of suitable particles include but are not limited to those described in U.S. Pat. No. 9,301,923.

[0649] For example, Su X, Fricke J, Kavanagh D G, Irvine D J (“In vitro and in vivo mRNA delivery using lipid-enveloped pH-responsive polymer nanoparticles” Mol Pharm. 2011 Jun. 6; 8(3):774-87. doi: 10.1021/mp100390w. Epub 2011 Apr. 1) describes biodegradable core-shell structured nanoparticles with a poly(O-amino ester) (PBAE) core enveloped by a phospholipid bilayer shell. These were developed for in vivo mRNA delivery. The pH-responsive PBAE component was chosen to promote endosome disruption, while the lipid surface layer was selected to minimize toxicity of the polycation core. Such are, therefore, preferred for delivering RNA of the present invention.

[0650] In one embodiment, particles/nanoparticles based on self assembling bioadhesive polymers are contemplated, which may be applied to oral delivery of peptides, intravenous delivery of peptides and nasal delivery of peptides, all to the brain. Other embodiments, such as oral absorption and ocular delivery of hydrophobic drugs are also contemplated. The molecular envelope technology involves an engineered polymer envelope which is protected and delivered to the site of the disease (see, e.g., Mazza, M. et al. ACSNano, 2013. 7(2): 1016-1026; Siew, A., et al. Mol Pharm, 2012. 9(1):14-28; Lalatsa, A., et al. J Contr Rel, 2012. 161(2):523-36; Lalatsa, A., et al., Mol Pharm, 2012. 9(6):1665-80; Lalatsa, A., et al. Mol Pharm, 2012. 9(6):1764-74; Garrett, N. L., et al. J Biophotonics, 2012. 5(5-6):458-68; Garrett, N. L., et al. J Raman Spect, 2012. 43(5):681-688; Ahmad, S., et al. J Royal Soc Interface 2010. 7:S423-33; Uchegbu, I.F. Expert Opin Drug Deliv, 2006. 3(5):629-40; Qu, X., et al. Biomacromolecules, 2006. 7(12):3452-9 and Uchegbu, I. F., et al. Int J Pharm, 2001. 224:185-199). Doses of about 5 mg/kg are contemplated, with single or multiple doses, depending on the target tissue.

[0651] In one embodiment, particles/nanoparticles that can deliver RNA to a cancer cell to stop tumor growth developed by Dan Anderson's lab at MIT may be used/and or adapted to the AD-functionalized CRISPR-Cas system of the present invention. In particular, the Anderson lab developed fully automated, combinatorial systems for the synthesis, purification, characterization, and formulation of new biomaterials and nanoformulations. See, e.g., Alabi et al., Proc Natl Acad Sci USA. 2013 Aug. 6; 110(32):12881-6; Zhang et al., Adv Mater. 2013 Sep. 6; 25(33):4641-5; Jiang et al., Nano Lett. 2013 Mar. 13; 13(3):1059-64; Karagiannis et al., ACS Nano. 2012 Oct. 23; 6(10):8484-7; Whitehead et al., ACS Nano. 2012 Aug. 28; 6(8):6922-9 and Lee et al., Nat Nanotechnol. 2012 Jun. 3; 7(6):389-93.

[0652] US patent application 20110293703 relates to lipidoid compounds are also particularly useful in the administration of polynucleotides, which may be applied to deliver the AD-functionalized CRISPR-Cas system of the present invention. In one aspect, the aminoalcohol lipidoid compounds are combined with an agent to be delivered to a cell or a subject to form microparticles, nanoparticles, liposomes, or micelles. The agent to be delivered by the particles, liposomes, or micelles may be in the form of a gas, liquid, or solid, and the agent may be a polynucleotide, protein, peptide, or small molecule. The aminoalcohol lipidoid compounds may be combined with other aminoalcohol lipidoid compounds, polymers (synthetic or natural), surfactants, cholesterol, carbohydrates, proteins, lipids, etc. to form the particles. These particles may then optionally be combined with a pharmaceutical excipient to form a pharmaceutical composition.

[0653] US Patent Publication No. 20110293703 also provides methods of preparing the aminoalcohol lipidoid compounds. One or more equivalents of an amine are allowed to react with one or more equivalents of an epoxide-terminated compound under suitable conditions to form an aminoalcohol lipidoid compound of the present invention. In certain embodiments, all the amino groups of the amine are fully reacted with the epoxide-terminated compound to form tertiary amines. In other embodiments, all the amino groups of the amine are not fully reacted with the epoxide-terminated compound to form tertiary amines thereby resulting in primary or secondary amines in the aminoalcohol lipidoid compound. These primary or secondary amines are left as is or may be reacted with another electrophile such as a different epoxide-terminated compound. As will be appreciated by one skilled in the art, reacting an amine with less than excess of epoxide-terminated compound will result in a plurality of different aminoalcohol lipidoid compounds with various numbers of tails. Certain amines may be fully functionalized with two epoxide-derived compound tails while other molecules will not be completely functionalized with epoxide-derived compound tails. For example, a diamine or polyamine may include one, two, three, or four epoxide-derived compound tails off the various amino moieties of the molecule resulting in primary, secondary, and tertiary amines. In certain embodiments, all the amino groups are not fully functionalized. In certain embodiments, two of the same types of epoxide-terminated compounds are used. In other embodiments, two or more different epoxide-terminated compounds are used. The synthesis of the aminoalcohol lipidoid compounds is performed with or without solvent, and the synthesis may be performed at higher temperatures ranging from 30−100° C., preferably at approximately 50-90° C. The prepared aminoalcohol lipidoid compounds may be optionally purified. For example, the mixture of aminoalcohol lipidoid compounds may be purified to yield an aminoalcohol lipidoid compound with a particular number of epoxide-derived compound tails. Or the mixture may be purified to yield a particular stereo- or regioisomer. The aminoalcohol lipidoid compounds may also be alkylated using an alkyl halide (e.g., methyl iodide) or other alkylating agent, and/or they may be acylated.

[0654] US Patent Publication No. 20110293703 also provides libraries of aminoalcohol lipidoid compounds prepared by the inventive methods. These aminoalcohol lipidoid compounds may be prepared and/or screened using high-throughput techniques involving liquid handlers, robots, microtiter plates, computers, etc. In certain embodiments, the aminoalcohol lipidoid compounds are screened for their ability to transfect polynucleotides or other agents (e.g., proteins, peptides, small molecules) into the cell.

[0655] US Patent Publication No. 20130302401 relates to a class of poly(beta-amino alcohols) (PBAAs) has been prepared using combinatorial polymerization. The inventive PBAAs may be used in biotechnology and biomedical applications as coatings (such as coatings of films or multilayer films for medical devices or implants), additives, materials, excipients, non-biofouling agents, micropatterning agents, and cellular encapsulation agents. When used as surface coatings, these PBAAs elicited different levels of inflammation, both in vitro and in vivo, depending on their chemical structures. The large chemical diversity of this class of materials allowed us to identify polymer coatings that inhibit macrophage activation in vitro. Furthermore, these coatings reduce the recruitment of inflammatory cells, and reduce fibrosis, following the subcutaneous implantation of carboxylated polystyrene microparticles. These polymers may be used to form polyelectrolyte complex capsules for cell encapsulation. The invention may also have many other biological applications such as antimicrobial coatings, DNA or siRNA delivery, and stem cell tissue engineering. The teachings of US Patent Publication No. 20130302401 may be applied to the AD-functionalized CRISPR-Cas system of the present invention.

[0656] Preassembled recombinant CRISPR-Cas complexes comprising Cas13, nucleotide deaminase (which may be fused to Cas13 or an adaptor protein), and guide RNA may be transfected, for example by electroporation, resulting in high mutation rates and absence of detectable off-target mutations. Hur, J. K. et al, Targeted mutagenesis in mice by electroporation of Cas13 ribonucleoproteins, Nat Biotechnol. 2016 Jun. 6. doi: 10.1038/nbt.3596.

[0657] In terms of local delivery to the brain, this can be achieved in various ways. For instance, material can be delivered intrastriatally e.g. by injection. Injection can be performed stereotactically via a craniotomy.

[0658] In some embodiments, sugar-based particles may be used, for example GalNAc, as described herein and with reference to WO2014118272 (incorporated herein by reference) and Nair, J K et al., 2014, Journal of the American Chemical Society 136 (49), 16958-16961) and the teaching herein, especially in respect of delivery applies to all particles unless otherwise apparent. This may be considered to be a sugar-based particle and further details on other particle delivery systems and/or formulations are provided herein. GalNAc can therefore be considered to be a particle in the sense of the other particles described herein, such that general uses and other considerations, for instance delivery of said particles, apply to GalNAc particles as well. A solution-phase conjugation strategy may for example be used to attach triantennary GalNAc clusters (mol. wt. ˜2000) activated as PFP (pentafluorophenyl) esters onto 5′-hexylamino modified oligonucleotides (5′-HA ASOs, mol. wt. ˜8000 Da; Ostergaard et al., Bioconjugate Chem., 2015, 26 (8), pp 1451-1455). Similarly, poly(acrylate) polymers have been described for in vivo nucleic acid delivery (see WO2013158141 incorporated herein by reference). In further alternative embodiments, pre-mixing CRISPR nanoparticles (or protein complexes) with naturally occurring serum proteins may be used in order to improve delivery (Akinc A et al, 2010, Molecular Therapy vol. 18 no. 7, 1357-1364).

### Nanoclews

[0659] Further, the AD-functionalized CRISPR system may be delivered using nanoclews, for example as described in Sun W et al, Cocoon-like self-degradable DNA nanoclew for anticancer drug delivery., J Am Chem Soc. 2014 Oct. 22; 136(42):14722-5. doi: 10.1021/ja5088024. Epub 2014 Oct. 13.; or in Sun W et al, Self-Assembled DNA Nanoclews for the Efficient Delivery of CRISPR-Cas9 for Genome Editing., Angew Chem Int Ed Engl. 2015 Oct. 5; 54(41):12029-33. doi: 10.1002/anie.201506030. Epub 2015 Aug. 27.

### LNP

[0660] In some embodiments, delivery is by encapsulation of the Cas13 protein or mRNA form in a lipid particle such as an LNP. In some embodiments, therefore, lipid nanoparticles (LNPs) are contemplated. An antitransthyretin small interfering RNA has been encapsulated in lipid nanoparticles and delivered to humans (see, e.g., Coelho et al., N Engl J Med 2013; 369:819-29), and such a system may be adapted and applied to the CRISPR Cas system of the present invention. Doses of about 0.01 to about 1 mg per kg of body weight administered intravenously are contemplated. Medications to reduce the risk of infusion-related reactions are contemplated, such as dexamethasone, acetampinophen, diphenhydramine or cetirizine, and ranitidine are contemplated. Multiple doses of about 0.3 mg per kilogram every 4 weeks for five doses are also contemplated.

[0661] LNPs have been shown to be highly effective in delivering siRNAs to the liver (see, e.g., Tabernero et al., Cancer Discovery, April 2013, Vol. 3, No. 4, pages 363-470) and are therefore contemplated for delivering RNA encoding CRISPR Cas to the liver. A dosage of about four doses of 6 mg/kg of the LNP every two weeks may be contemplated. Tabernero et al. demonstrated that tumor regression was observed after the first 2 cycles of LNPs dosed at 0.7 mg/kg, and by the end of 6 cycles the patient had achieved a partial response with complete regression of the lymph node metastasis and substantial shrinkage of the liver tumors. A complete response was obtained after 40 doses in this patient, who has remained in remission and completed treatment after receiving doses over 26 months. Two patients with RCC and extrahepatic sites of disease including kidney, lung, and lymph nodes that were progressing following prior therapy with VEGF pathway inhibitors had stable disease at all sites for approximately 8 to 12 months, and a patient with PNET and liver metastases continued on the extension study for 18 months (36 doses) with stable disease.

[0662] However, the charge of the LNP must be taken into consideration. As cationic lipids combined with negatively charged lipids to induce nonbilayer structures that facilitate intracellular delivery. Because charged LNPs are rapidly cleared from circulation following intravenous injection, ionizable cationic lipids with pKa values below 7 were developed (see, e.g., Rosin et al, Molecular Therapy, vol. 19, no. 12, pages 1286-2200, December 2011). Negatively charged polymers such as RNA may be loaded into LNPs at low pH values (e.g., pH 4) where the ionizable lipids display a positive charge. However, at physiological pH values, the LNPs exhibit a low surface charge compatible with longer circulation times. Four species of ionizable cationic lipids have been focused upon, namely 1,2-dilineoyl-3-dimethylammonium-propane (DLinDAP), 1,2-dilinoleyloxy-3-N,N-dimethylaminopropane (DLinDMA), 1,2-dilinoleyloxy-keto-N,N-dimethyl-3-aminopropane (DLinKDMA), and 1,2-dilinoleyl-4-(2-dimethylaminoethyl)-[1,3]-dioxolane (DLinKC2-DMA). It has been shown that LNP siRNA systems containing these lipids exhibit remarkably different gene silencing properties in hepatocytes in vivo, with potencies varying according to the series DLinKC2-DMA>DLinKDMA>DLinDMA>>DLinDAP employing a Factor VII gene silencing model (see, e.g., Rosin et al, Molecular Therapy, vol. 19, no. 12, pages 1286-2200, December 2011). A dosage of 1 g/ml of LNP or CRISPR-Cas RNA in or associated with the LNP may be contemplated, especially for a formulation containing DLinKC2-DMA.

[0663] Preparation of LNPs and CRISPR Cas encapsulation may be used/and or adapted from Rosin et al, Molecular Therapy, vol. 19, no. 12, pages 1286-2200, December 2011). The cationic lipids 1,2-dilineoyl-3-dimethylammonium-propane (DLinDAP), 1,2-dilinoleyloxy-3-N,N-dimethylaminopropane (DLinDMA), 1,2-dilinoleyloxyketo-N,N-dimethyl-3-aminopropane (DLinK-DMA), 1,2-dilinoleyl-4-(2-dimethylaminoethyl)-[1,3]-dioxolane (DLinKC2-DMA), (3-o-[2″-(methoxypolyethyleneglycol 2000) succinoyl]-1,2-dimyristoyl-sn-glycol (PEG-S-DMG), and R-3-[(ω-methoxy-poly(ethylene glycol)2000) carbamoyl]-1,2-dimyristyloxlpropyl-3-amine (PEG-C-DOMG) may be provided by Tekmira Pharmaceuticals (Vancouver, Canada) or synthesized. Cholesterol may be purchased from Sigma (St Louis, Mo.). The specific CRISPR Cas RNA may be encapsulated in LNPs containing DLinDAP, DLinDMA, DLinK-DMA, and DLinKC2-DMA (cationic lipid:DSPC:CHOL: PEGS-DMG or PEG-C-DOMG at 40:10:40:10 molar ratios). When required, 0.2% SP-DiOC18 (Invitrogen, Burlington, Canada) may be incorporated to assess cellular uptake, intracellular delivery, and biodistribution. Encapsulation may be performed by dissolving lipid mixtures comprised of cationic lipid:DSPC:cholesterol:PEG-c-DOMG (40:10:40:10 molar ratio) in ethanol to a final lipid concentration of 10 mmol/l. This ethanol solution of lipid may be added drop-wise to 50 mmol/l citrate, pH 4.0 to form multilamellar vesicles to produce a final concentration of 30% ethanol vol/vol. Large unilamellar vesicles may be formed following extrusion of multilamellar vesicles through two stacked 80 nm Nuclepore polycarbonate filters using the Extruder (Northern Lipids, Vancouver, Canada). Encapsulation may be achieved by adding RNA dissolved at 2 mg/ml in 50 mmol/l citrate, pH 4.0 containing 30% ethanol vol/vol drop-wise to extruded preformed large unilamellar vesicles and incubation at 31° C. for 30 minutes with constant mixing to a final RNA/lipid weight ratio of 0.06/1 wt/wt. Removal of ethanol and neutralization of formulation buffer were performed by dialysis against phosphate-buffered saline (PBS), pH 7.4 for 16 hours using Spectra/Por 2 regenerated cellulose dialysis membranes. Nanoparticle size distribution may be determined by dynamic light scattering using a NICOMP 370 particle sizer, the vesicle/intensity modes, and Gaussian fitting (Nicomp Particle Sizing, Santa Barbara, Calif.). The particle size for all three LNP systems may be ˜70 nm in diameter. RNA encapsulation efficiency may be determined by removal of free RNA using VivaPureD MiniH columns (Sartorius Stedim Biotech) from samples collected before and after dialysis. The encapsulated RNA may be extracted from the eluted nanoparticles and quantified at 260 nm. RNA to lipid ratio was determined by measurement of cholesterol content in vesicles using the Cholesterol E enzymatic assay from Wako Chemicals USA (Richmond, Va.). In conjunction with the herein discussion of LNPs and PEG lipids, PEGylated liposomes or LNPs are likewise suitable for delivery of a CRISPR-Cas system or components thereof.

[0664] A lipid premix solution (20.4 mg/ml total lipid concentration) may be prepared in ethanol containing DLinKC2-DMA, DSPC, and cholesterol at 50:10:38.5 molar ratios. Sodium acetate may be added to the lipid premix at a molar ratio of 0.75:1 (sodium acetate:DLinKC2-DMA). The lipids may be subsequently hydrated by combining the mixture with 1.85 volumes of citrate buffer (10 mmol/l, pH 3.0) with vigorous stirring, resulting in spontaneous liposome formation in aqueous buffer containing 35% ethanol. The liposome solution may be incubated at 37° C. to allow for time-dependent increase in particle size. Aliquots may be removed at various times during incubation to investigate changes in liposome size by dynamic light scattering (Zetasizer Nano Z S, Malvern Instruments, Worcestershire, UK). Once the desired particle size is achieved, an aqueous PEG lipid solution (stock=10 mg/ml PEG-DMG in 35% (vol/vol) ethanol) may be added to the liposome mixture to yield a final PEG molar concentration of 3.5% of total lipid. Upon addition of PEG-lipids, the liposomes should their size, effectively quenching further growth. RNA may then be added to the empty liposomes at an RNA to total lipid ratio of approximately 1:10 (wt:wt), followed by incubation for 30 minutes at 37° C. to form loaded LNPs. The mixture may be subsequently dialyzed overnight in PBS and filtered with a 0.45-μm syringe filter.

[0665] Spherical Nucleic Acid (SNA™) constructs and other nanoparticles (particularly gold nanoparticles) are also contemplated as a means to delivery CRISPR-Cas system to intended targets. Significant data show that AuraSense Therapeutics' Spherical Nucleic Acid (SNA™) constructs, based upon nucleic acid-functionalized gold nanoparticles, are useful.

[0666] Literature that may be employed in conjunction with herein teachings include: Cutler et al., J. Am. Chem. Soc. 2011 133:9254-9257, Hao et al., Small. 2011 7:3158-3162, Zhang et al., ACS Nano. 2011 5:6962-6970, Cutler et al., J. Am. Chem. Soc. 2012 134:1376-1391, Young et al., Nano Lett. 2012 12:3867-71, Zheng et al., Proc. Natl. Acad. Sci. USA. 2012 109:11975-80, Mirkin, Nanomedicine 2012 7:635-638 Zhang et al., J. Am. Chem. Soc. 2012 134:16488-1691, Weintraub, Nature 2013 495:S14-S16, Choi et al., Proc. Natl. Acad. Sci. USA. 2013 110(19):7625-7630, Jensen et al., Sci. Transl. Med. 5, 209ra152 (2013) and Mirkin, et al., Small, 10:186-192.

[0667] Self-assembling nanoparticles with RNA may be constructed with polyethyleneimine (PEI) that is PEGylated with an Arg-Gly-Asp (RGD) peptide ligand attached at the distal end of the polyethylene glycol (PEG). This system has been used, for example, as a means to target tumor neovasculature expressing integrins and deliver siRNA inhibiting vascular endothelial growth factor receptor-2 (VEGF R2) expression and thereby achieve tumor angiogenesis (see, e.g., Schiffelers et al., Nucleic Acids Research, 2004, Vol. 32, No. 19). Nanoplexes may be prepared by mixing equal volumes of aqueous solutions of cationic polymer and nucleic acid to give a net molar excess of ionizable nitrogen (polymer) to phosphate (nucleic acid) over the range of 2 to 6. The electrostatic interactions between cationic polymers and nucleic acid resulted in the formation of polyplexes with average particle size distribution of about 100 nm, hence referred to here as nanoplexes. A dosage of about 100 to 200 mg of CRISPR Cas is envisioned for delivery in the self-assembling nanoparticles of Schiffelers et al.

[0668] The nanoplexes of Bartlett et al. (PNAS, Sep. 25, 2007, vol. 104, no. 39) may also be applied to the present invention. The nanoplexes of Bartlett et al. are prepared by mixing equal volumes of aqueous solutions of cationic polymer and nucleic acid to give a net molar excess of ionizable nitrogen (polymer) to phosphate (nucleic acid) over the range of 2 to 6. The electrostatic interactions between cationic polymers and nucleic acid resulted in the formation of polyplexes with average particle size distribution of about 100 nm, hence referred to here as nanoplexes. The DOTA-siRNA of Bartlett et al. was synthesized as follows: 1,4,7,10-tetraazacyclododecane-1,4,7,10-tetraacetic acid mono(N-hydroxysuccinimide ester) (DOTA-NHSester) was ordered from Macrocyclics (Dallas, Tex.). The amine modified RNA sense strand with a 100-fold molar excess of DOTA-NHS-ester in carbonate buffer (pH 9) was added to a microcentrifuge tube. The contents were reacted by stirring for 4 h at room temperature. The DOTA-RNAsense conjugate was ethanol-precipitated, resuspended in water, and annealed to the unmodified antisense strand to yield DOTA-siRNA. All liquids were pretreated with Chelex-100 (Bio-Rad, Hercules, Calif.) to remove trace metal contaminants. Tf-targeted and nontargeted siRNA nanoparticles may be formed by using cyclodextrin-containing polycations. Typically, nanoparticles were formed in water at a charge ratio of 3 (+/−) and an siRNA concentration of 0.5 g/liter. One percent of the adamantane-PEG molecules on the surface of the targeted nanoparticles were modified with Tf (adamantane-PEG-Tf). The nanoparticles were suspended in a 5% (wt/vol) glucose carrier solution for injection.

[0669] Davis et al. (Nature, Vol 464, 15 Apr. 2010) conducts a RNA clinical trial that uses a targeted nanoparticle-delivery system (clinical trial registration number NCT00689065). Patients with solid cancers refractory to standard-of-care therapies are administered doses of targeted nanoparticles on days 1, 3, 8 and 10 of a 21-day cycle by a 30-min intravenous infusion. The nanoparticles consist of a synthetic delivery system containing: (1) a linear, cyclodextrin-based polymer (CDP), (2) a human transferrin protein (TF) targeting ligand displayed on the exterior of the nanoparticle to engage TF receptors (TFR) on the surface of the cancer cells, (3) a hydrophilic polymer (polyethylene glycol (PEG) used to promote nanoparticle stability in biological fluids), and (4) siRNA designed to reduce the expression of the RRM2 (sequence used in the clinic was previously denoted siR2B+5). The TFR has long been known to be upregulated in malignant cells, and RRM2 is an established anti-cancer target. These nanoparticles (clinical version denoted as CALAA-01) have been shown to be well tolerated in multi-dosing studies in non-human primates. Although a single patient with chronic myeloid leukaemia has been administered siRNA by liposomal delivery, Davis et al.'s clinical trial is the initial human trial to systemically deliver siRNA with a targeted delivery system and to treat patients with solid cancer. To ascertain whether the targeted delivery system can provide effective delivery of functional siRNA to human tumors, Davis et al. investigated biopsies from three patients from three different dosing cohorts; patients A, B and C, all of whom had metastatic melanoma and received CALAA-01 doses of 18, 24 and 30 mg m-2 siRNA, respectively. Similar doses may also be contemplated for the CRISPR Cas system of the present invention. The delivery of the invention may be achieved with nanoparticles containing a linear, cyclodextrin-based polymer (CDP), a human transferrin protein (TF) targeting ligand displayed on the exterior of the nanoparticle to engage TF receptors (TFR) on the surface of the cancer cells and/or a hydrophilic polymer (for example, polyethylene glycol (PEG) used to promote nanoparticle stability in biological fluids).

[0670] U.S. Pat. No. 8,709,843, incorporated herein by reference, provides a drug delivery system for targeted delivery of therapeutic agent-containing particles to tissues, cells, and intracellular compartments. The invention provides targeted particles comprising comprising polymer conjugated to a surfactant, hydrophilic polymer or lipid. U.S. Pat. No. 6,007,845, incorporated herein by reference, provides particles which have a core of a multiblock copolymer formed by covalently linking a multifunctional compound with one or more hydrophobic polymers and one or more hydrophilic polymers, and conatin a biologically active material. U.S. Pat. No. 5,855,913, incorporated herein by reference, provides a particulate composition having aerodynamically light particles having a tap density of less than 0.4 g/cm3 with a mean diameter of between 5 μm and 30μ m, incorporating a surfactant on the surface thereof for drug delivery to the pulmonary system. U.S. Pat. No. 5,985,309, incorporated herein by reference, provides particles incorporating a surfactant and/or a hydrophilic or hydrophobic complex of a positively or negatively charged therapeutic or diagnostic agent and a charged molecule of opposite charge for delivery to the pulmonary system. U.S. Pat. No. 5,543,158, incorporated herein by reference, provides biodegradable injectable particles having a biodegradable solid core containing a biologically active material and poly(alkylene glycol) moieties on the surface. WO2012135025 (also published as US20120251560), incorporated herein by reference, describes conjugated polyethyleneimine (PEI) polymers and conjugated aza-macrocycles (collectively referred to as “conjugated lipomer” or “lipomers”). In certain embodiments, it can envisioned that such conjugated lipomers can be used in the context of the CRISPR-Cas system to achieve in vitro, ex vivo and in vivo genomic perturbations to modify gene expression, including modulation of protein expression.

[0671] In one embodiment, the nanoparticle may be epoxide-modified lipid-polymer, advantageously 7C1 (see, e.g., James E. Dahlman and Carmen Barnes et al. Nature Nanotechnology (2014) published online 11 May 2014, doi:10.1038/nnano.2014.84). C71 was synthesized by reacting C15 epoxide-terminated lipids with PEI600 at a 14:1 molar ratio, and was formulated with C14PEG2000 to produce nanoparticles (diameter between 35 and 60 nm) that were stable in PBS solution for at least 40 days.

[0672] An epoxide-modified lipid-polymer may be utilized to deliver the CRISPR-Cas system of the present invention to pulmonary, cardiovascular or renal cells, however, one of skill in the art may adapt the system to deliver to other target organs. Dosage ranging from about 0.05 to about 0.6 mg/kg are envisioned. Dosages over several days or weeks are also envisioned, with a total dosage of about 2 mg/kg.

[0673] In some embodiments, the LNP for deliverting the RNA molecules is prepared by methods known in the art, such as those described in, for example, WO 2005/105152 (PCT/EP2005/004920), WO 2006/069782 (PCT/EP2005/014074), WO 2007/121947 (PCT/EP2007/003496), and WO 2015/082080 (PCT/EP2014/003274), which are herein incorporated by reference. LNPs aimed specifically at the enhanced and improved delivery of siRNA into mammalian cells are described in, for example, Aleku et al., Cancer Res., 68(23): 9788-98 (Dec. 1, 2008), Strumberg et al., Int. J. Clin. Pharmacol. Ther., 50(1): 76-8 (January 2012), Schultheis et al., J. Clin. Oncol., 32(36): 4141-48 (Dec. 20, 2014), and Fehring et al., Mol. Ther., 22(4): 811-20 (Apr. 22, 2014), which are herein incorporated by reference and may be applied to the present technology.

[0674] In some embodiments, the LNP includes any LNP disclosed in WO 2005/105152 (PCT/EP2005/004920), WO 2006/069782 (PCT/EP2005/014074), WO 2007/121947 (PCT/EP2007/003496), and WO 2015/082080 (PCT/EP2014/003274).

[0675] In some embodiments, the LNP includes at least one lipid having Formula I:

[0676] (Formula I), wherein R1 and R2 are each and independently selected from the group comprising alkyl, n is any integer between 1 and 4, and R3 is an acyl selected from the group comprising lysyl, ornithyl, 2,4-diaminobutyryl, histidyl and an acyl moiety according to Formula II:

[chemical structure]

wherein m is any integer from 1 to 3 and Y⁻ is a pharmaceutically acceptable anion. In some embodiments, a lipid according to Formula I includes at least two asymmetric C atoms. In some embodiments, enantiomers of Formula I include, but are not limited to, R—R; S—S; R—S and S—R enantiomer.

[0677] In some embodiments, R1 is lauryl and R2 is myristyl. In another embodiment, R1 is palmityl and R2 is oleyl. In some embodiments, m is 1 or 2. In some embodiments, Y⁻ is selected from halogenids, acetate or trifluoroacetate.

[0678] In some embodiments, the LNP comprises one or more lipids select from:

[0679] -arginyl-2,3-diamino propionic acid-N-palmityl-N-oleyl-amide trihydrochloride (Formula III):

[chemical structure]

[0680] -arginyl-2,3-diamino propionic acid-N-lauryl-N-myristyl-amide trihydrochloride (Formula IV):

[chemical structure]

and

[0681] -arginyl-lysine-N-lauryl-N-myristyl-amide trihydrochloride (Formula V):

[chemical structure]

[0682] In some embodiments, the LNP also includes a constituent. By way of example, but not by way of limitation, in some embodiments, the constituent is selected from peptides, proteins, oligonucleotides, polynucleotides, nucleic acids, or a combination thereof. In some embodiments, the constituent is an antibody, e.g., a monoclonal antibody. In some embodiments, the constituent is a nucleic acid selected from, e.g., ribozymes, aptamers, spiegelmers, DNA, RNA, PNA, LNA, or a combination thereof. In some embodiments, the nucleic acid is guide RNA and/or mRNA.

[0683] In some embodiments, the constituent of the LNP comprises an mRNA encoding a CRIPSR-Cas protein. In some embodiments, the constituent of the LNP comprises an mRNA encoding a Type-II or Type-V CRIPSR-Cas protein. In some embodiments, the constituent of the LNP comprises an mRNA encoding an nucleotide deaminase (which may be fused to a CRISPR-Cas protein or an adaptor protein).

[0684] In some embodiments, the constituent of the LNP further comprises one or more guide RNA. In some embodiments, the LNP is configured to deliver the aforementioned mRNA and guide RNA to vascular endothelium. In some embodiments, the LNP is configured to deliver the aforementioned mRNA and guide RNA to pulmonary endothelium. In some embodiments, the LNP is configured to deliver the aforementioned mRNA and guide RNA to liver. In some embodiments, the LNP is configured to deliver the aforementioned mRNA and guide RNA to lung. In some embodiments, the LNP is configured to deliver the aforementioned mRNA and guide RNA to hearts. In some embodiments, the LNP is configured to deliver the aforementioned mRNA and guide RNA to spleen. In some embodiments, the LNP is configured to deliver the aforementioned mRNA and guide RNA to kidney. In some embodiments, the LNP is configured to deliver the aforementioned mRNA and guide RNA to pancrea. In some embodiments, the LNP is configured to deliver the aforementioned mRNA and guide RNA to brain. In some embodiments, the LNP is configured to deliver the aforementioned mRNA and guide RNA to macrophages.

[0685] In some embodiments, the LNP also includes at least one helper lipid. In some embodiments, the helper lipid is selected from phospholipids and steroids. In some embodiments, the phospholipids are di- and/or monoester of the phosphoric acid. In some embodiments, the phospholipids are phosphoglycerides and/or sphingolipids. In some embodiments, the steroids are naturally occurring and/or synthetic compounds based on the partially hydrogenated cyclopenta[a]phenanthrene. In some embodiments, the steroids contain 21 to 30 C atoms. In some embodiments, the steroid is cholesterol. In some embodiments, the helper lipid is selected from 1,2-diphytanoyl-sn-glycero-3-phosphoethanolamine (DPhyPE), ceramide, and 1,2-dioleylsn-glycero-3-phosphoethanolamine(DOPE).

[0686] In some embodiments, the at least one helper lipid comprises a moiety selected from the group comprising a PEG moiety, a HEG moiety, a polyhydroxyethyl starch (polyHES) moiety and a polypropylene moiety. In some embodiments, the moiety has a molecule weight between about 500 to 10,000 Da or between about 2,000 to 5,000 Da. In some embodiments, the PEG moiety is selected from 1,2-distearoyl-sn-glycero-3 phosphoethanolamine, 1,2-dialkyl-sn-glycero-3-phosphoethanolamine, and Ceramide-PEG. In some embodiments, the PEG moiety has a molecular weight between about 500 to 10,000 Da or between about 2,000 to 5,000 Da. In some embodiments, the PEG moiety has a molecular weight of 2,000 Da.

[0687] In some embodiments, the helper lipid is between about 20 mol % to 80 mol % of the total lipid content of the composition. In some embodiments, the helper lipid component is between about 35 mol % to 65 mol % of the total lipid content of the LNP. In some embodiments, the LNP includes lipids at 50 mol % and the helper lipid at 50 mol % of the total lipid content of the LNP.

[0688] In some embodiments, the LNP includes any of -3-arginyl-2,3-diaminopropionic acid-N-palmityl-N-oleyl-amide trihydrochloride, -arginyl-2,3-diaminopropionic acid-N-lauryl-N-myristyl-amide trihydrochloride or -arginyl-lysine-N-lauryl-N-myristyl-amide trihydrochloride in combination with DPhyPE, wherein the content of DPhyPE is about 80 mol %, 65 mol %, 50 mol % and 35 mol % of the overall lipid content of the LNP. In some embodiments, the LNP includes -arginyl-2,3-diamino propionic acid-N-pahnityl-N-oleyl-amide trihydrochloride (lipid) and 1,2-diphytanoyl-sn-glycero-3-phosphoethanolamine (helper lipid). In some embodiments, the LNP includes -arginyl-2,3-diamino propionic acid-N-palmityl-N-oleyl-amide trihydrochloride (lipid), 1,2-diphytanoyl-sn-glycero-3-phosphoethanolamine (first helper lipid), and 1,2-disteroyl-sn-glycero-3-phosphoethanolamine-PEG2000 (second helper lipid).

[0689] In some embodiments, the second helper lipid is between about 0.05 mol % to 4.9 mol % or between about 1 mol % to 3 mol % of the total lipid content. In some embodiments, the LNP includes lipids at between about 45 mol % to 50 mol % of the total lipid content, a first helper lipid between about 45 mol % to 50 mol % of the total lipid content, under the proviso that there is a PEGylated second helper lipid between about 0.1 mol % to 5 mol %, between about 1 mol % to 4 mol %, or at about 2 mol % of the total lipid content, wherein the sum of the content of the lipids, the first helper lipid, and of the second helper lipid is 100 mol % of the total lipid content and wherein the sum of the first helper lipid and the second helper lipid is 50 mol % of the total lipid content. In some embodiments, the LNP comprises: (a) 50 mol % of -arginyl-2,3-diamino propionic acid-N-palmityl-N-oleyl-amide trihydrochloride, 48 mol % of 1,2-diphytanoyl-sn-glycero-3-phosphoethanolamine; and 2 mol % 1,2-distearoyl-sn-glycero-3-phosphoethanolamine-PEG2000; or (b) 50 mol % of -arginyl-2,3-diamino propionic acid-N-palmityl-N-oleyl-amide trihydrocloride, 49 mol % 1,2-diphytanoyl-sn-glycero-3-phosphoethanolamine; and 1 mol % N(Carbonyl-methoxypolyethylenglycol-2000)-1,2-distearoyl-sn-glycero3-phosphoethanolamine, or a sodium salt thereof.

[0690] In some embodiments, the LNP contains a nucleic acid, wherein the charge ratio of nucleic acid backbone phosphates to cationic lipid nitrogen atoms is about 1: 1.5-7 or about 1:4.

[0691] In some embodiments, the LNP also includes a shielding compound, which is removable from the lipid composition under in vivo conditions. In some embodiments, the shielding compound is a biologically inert compound. In some embodiments, the shielding compound does not carry any charge on its surface or on the molecule as such. In some embodiments, the shielding compounds are polyethylenglycoles (PEGs), hydroxyethylglucose (HEG) based polymers, polyhydroxyethyl starch (polyHES) and polypropylene. In some embodiments, the PEG, HEG, polyHES, and a polypropylene weight between about 500 to 10,000 Da or between about 2000 to 5000 Da. In some embodiments, the shielding compound is PEG2000 or PEG5000.

[0692] In some embodiments, the LNP includes at least one lipid, a first helper lipid, and a shielding compound that is removable from the lipid composition under in vivo conditions. In some embodiments, the LNP also includes a second helper lipid. In some embodiments, the first helper lipid is ceramide. In some embodiments, the second helper lipid is ceramide. In some embodiments, the ceramide comprises at least one short carbon chain substituent of from 6 to 10 carbon atoms. In some embodiments, the ceramide comprises 8 carbon atoms. In some embodiments, the shielding compound is attached to a ceramide. In some embodiments, the shielding compound is attached to a ceramide. In some embodiments, the shielding compound is covalently attached to the ceramide. In some embodiments, the shielding compound is attached to a nucleic acid in the LNP. In some embodiments, the shielding compound is covalently attached to the nucleic acid. In some embodiments, the shielding compound is attached to the nucleic acid by a linker. In some embodiments, the linker is cleaved under physiological conditions. In some embodiments, the linker is selected from ssRNA, ssDNA, dsRNA, dsDNA, peptide, S—S-linkers and pH sensitive linkers. In some embodiments, the linker moiety is attached to the 3′ end of the sense strand of the nucleic acid. In some embodiments, the shielding compound comprises a pH-sensitive linker or a pH-sensitive moiety. In some embodiments, the pH-sensitive linker or pH-sensitive moiety is an anionic linker or an anionic moiety. In some embodiments, the anionic linker or anionic moiety is less anionic or neutral in an acidic environment. In some embodiments, the pH-sensitive linker or the pH-sensitive moiety is selected from the oligo (glutamic acid), oligophenolate(s) and diethylene triamine penta acetic acid.

[0693] In any of the LNP embodiments in the previous paragraph, the LNP can have an osmolality between about 50 to 600 mosmole/kg, between about 250 to 350 mosmole/kg, or between about 280 to 320 mosmole/kg, and/or wherein the LNP formed by the lipid and/or one or two helper lipids and the shielding compound have a particle size between about 20 to 200 nm, between about 30 to 100 nm, or between about 40 to 80 nm.

[0694] In some embodiments, the shielding compound provides for a longer circulation time in vivo and allows for a better biodistribution of the nucleic acid containing LNP. In some embodiments, the shielding compound prevents immediate interaction of the LNP with serum compounds or compounds of other bodily fluids or cytoplasma membranes, e.g., cytoplasma membranes of the endothelial lining of the vasculature, into which the LNP is administered. Additionally or alternatively, in some embodiments, the shielding compounds also prevent elements of the immune system from immediately interacting with the LNP. Additionally or alternatively, in some embodiments, the shielding compound acts as an anti-opsonizing compound. Without wishing to be bound by any mechanism or theory, in some embodiments, the shielding compound forms a cover or coat that reduces the surface area of the LNP available for interaction with its environment. Additionally or alternatively, in some embodiments, the shielding compound shields the overall charge of the LNP.

[0695] In another embodiment, the LNP includes at least one cationic lipid having Formula VI:

[chemical structure]

wherein n is 1, 2, 3, or 4, wherein m is 1, 2, or 3, wherein Y⁻ is anion, wherein each of R¹ and R² is individually and independently selected from the group consisting of linear C12-C18 alkyl and linear C12-C18 alkenyl, a sterol compound, wherein the sterol compound is selected from the group consisting of cholesterol and stigmasterol, and a PEGylated lipid, wherein the PEGylated lipid comprises a PEG moiety, wherein the PEGylated lipid is selected from the group consisting of:
a PEGylated phosphoethanolamine of Formula VII:

[chemical structure]

wherein R³ and R⁴ are individually and independently linear C13-C17 alkyl, and p is any integer between 15 to 130;
a PEGylated ceramide of Formula VIII:

[chemical structure]

wherein R⁵ is linear C7-C15 alkyl, and q is any number between 15 to 130; and
a PEGylated diacylglycerol of Formula IX:

[chemical structure]

wherein each of R⁶ and R⁷ is individually and independently linear C11-C17 alkyl, and r is any integer from 15 to 130.

[0696] In some embodiments, R¹ and R² are different from each other. In some embodiments, R¹ is palmityl and R² is oleyl. In some embodiments, R¹ is lauryl and R² is myristyl. In some embodiments, R¹ and R² are the same. In some embodiments, each of R¹ and R² is individually and independently selected from the group consisting of C12 alkyl, C14 alkyl, C16 alkyl, C18 alkyl, C12 alkenyl, C14 alkenyl, C16 alkenyl and C18 alkenyl. In some embodiments, each of C12 alkenyl, C14 alkenyl, C16 alkenyl and C18 alkenyl comprises one or two double bonds. In some embodiments, C18 alkenyl is C18 alkenyl with one double bond between C9 and C10. In some embodiments, C18 alkenyl is cis-9-octadecyl.

[0697] In some embodiments, the cationic lipid is a compound of Formula X:

[chemical structure]

In some embodiments, Y⁻ is selected from halogenids, acetate and trifluoroacetate. In some embodiments, the cationic lipid is -arginyl-2,3-diamino propionic acid-N-palmityl-N-oleyl-amide trihydrochloride of Formula III:

[chemical structure]

In some embodiments, the cationic lipid is -arginyl-2,3-diamino propionic acid-N-lauryl-N-myristyl-amide trihydrochloride of Formula IV:

[chemical structure]

In some embodiments, the cationic lipid is -arginyl-lysine-N-lauryl-N-myristyl-amide trihydrochloride of Formula V:

[chemical structure]

[0698] In some embodiments, the sterol compound is cholesterol. In some embodiments, the sterol compound is stigmasterin.

[0699] In some embodiments, the PEG moiety of the PEGylated lipid has a molecular weight from about 800 to 5,000 Da. In some embodiments, the molecular weight of the PEG moiety of the PEGylated lipid is about 800 Da. In some embodiments, the molecular weight of the PEG moiety of the PEGylated lipid is about 2,000 Da. In some embodiments, the molecular weight of the PEG moiety of the PEGylated lipid is about 5,000 Da. In some embodiments, the PEGylated lipid is a PEGylated phosphoethanolamine of Formula VII, wherein each of R³ and R⁴ is individually and independently linear C13-C17 alkyl, and p is any integer from 18, 19 or 20, or from 44, 45 or 46 or from 113, 114 or 115. In some embodiments, R³ and R⁴ are the same. In some embodiments, R³ and R⁴ are different. In some embodiments, each of R³ and R⁴ is individually and independently selected from the group consisting of C13 alkyl, C15 alkyl and C17 alkyl. In some embodiments, the PEGylated phosphoethanolamine of Formula VII is 1,2-distearoyl-sn-glycero-3-phosphoethanolamine-N-[methoxy(polyethylene glycol)-2000] (ammonium salt):

[chemical structure]

In some embodiments, the PEGylated phosphoethanolamine of Formula VII is 1,2-distearoyl-sn-glycero-3-phosphoethanolamine-N-[methoxy(polyethylene glycol)-5000](ammonium salt):

[chemical structure]

In some embodiments, the PEGylated lipid is a PEGylated ceramide of Formula VIII, wherein R⁵ is linear C7-C15 alkyl, and q is any integer from 18, 19 or 20, or from 44, 45 or 46 or from 113, 114 or 115. In some embodiments, R⁵ is linear C7 alkyl. In some embodiments, R⁵ is linear C15 alkyl. In some embodiments, the PEGylated ceramide of Formula VIII is N-octanoyl-sphingosine-1-{succinyl[methoxy(polyethylene glycol)2000]}:

[chemical structure]

In some embodiments, the PEGylated ceramide of Formula VIII is N-palmitoyl-sphingosine-1-{succinyl[methoxy(polyethylene glycol)2000]}

[chemical structure]

In some embodiments, the PEGylated lipid is a PEGylated diacylglycerol of Formula IX, wherein each of R⁶ and R⁷ is individually and independently linear C1-C17 alkyl, and r is any integer from 18, 19 or 20, or from 44, 45 or 46 or from 113, 114 or 115. In some embodiments, R⁶ and R⁷ are the same. In some embodiments, R⁶ and R⁷ are different. In some embodiments, each of R⁶ and R⁷ is individually and independently selected from the group consisting of linear C17 alkyl, linear C15 alkyl and linear C13 alkyl. In some embodiments, the PEGylated diacylglycerol of Formula IX 1,2-Distearoyl-sn-glycerol [methoxy(polyethyleneglycol)2000]:

[chemical structure]

In some embodiments, the PEGylated diacylglycerol of Formula IX is 1,2-Dipalmitoyl-sn-glycerol [methoxy(polyethylene glycol)2000]:

[chemical structure]

In some embodiments, the PEGylated diacylglycerol of Formula IX is:

[chemical structure]

In some embodiments, the LNP includes at least one cationic lipid selected from of Formulas III, IV, and V, at least one sterol compound selected from a cholesterol and stigmasterin, and wherein the PEGylated lipid is at least one selected from Formulas XI and XII. In some embodiments, the LNP includes at least one cationic lipid selected from Formulas III, IV, and V, at least one sterol compound selected from a cholesterol and stigmasterin, and wherein the PEGylated lipid is at least one selected from Formulas XIII and XIV. In some embodiments, the LNP includes at least one cationic lipid selected from Formulas III, IV, and V, at least one sterol compound selected from a cholesterol and stigmasterin, and wherein the PEGylated lipid is at least one selected from Formulas XV and XVI. In some embodiments, the LNP includes a cationic lipid of Formula III, a cholesterol as the sterol compound, and wherein the PEGylated lipid is Formula XI.

[0700] In any of the LNP embodiments in the previous paragraph, wherein the content of the cationic lipid composition is between about 65 mole % to 75 mole %, the content of the sterol compound is between about 24 mole % to 34 mole % and the content of the PEGylated lipid is between about 0.5 mole % to 1.5 mole %, wherein the sum of the content of the cationic lipid, of the sterol compound and of the PEGylated lipid for the lipid composition is 100 mole %. In some embodiments, the cationic lipid is about 70 mole %, the content of the sterol compound is about 29 mole % and the content of the PEGylated lipid is about 1 mole %. In some embodiments, the LNP is 70 mole % of Formula III, 29 mole % of cholesterol, and 1 mole % of Formula XI.

### Exosomes

[0701] Exosomes are endogenous nano-vesicles that transport RNAs and proteins, and which can deliver RNA to the brain and other target organs. To reduce immunogenicity, Alvarez-Erviti et al. (2011, Nat Biotechnol 29: 341) used self-derived dendritic cells for exosome production. Targeting to the brain was achieved by engineering the dendritic cells to express Lamp2b, an exosomal membrane protein, fused to the neuron-specific RVG peptide. Purified exosomes were loaded with exogenous RNA by electroporation. Intravenously injected RVG-targeted exosomes delivered GAPDH siRNA specifically to neurons, microglia, oligodendrocytes in the brain, resulting in a specific gene knockdown. Pre-exposure to RVG exosomes did not attenuate knockdown, and non-specific uptake in other tissues was not observed. The therapeutic potential of exosome-mediated siRNA delivery was demonstrated by the strong mRNA (60%) and protein (62%) knockdown of BACE1, a therapeutic target in Alzheimer's disease.

[0702] To obtain a pool of immunologically inert exosomes, Alvarez-Erviti et al. harvested bone marrow from inbred C57BL/6 mice with a homogenous major histocompatibility complex (MHC) haplotype. As immature dendritic cells produce large quantities of exosomes devoid of T-cell activators such as MHC-II and CD86, Alvarez-Erviti et al. selected for dendritic cells with granulocyte/macrophage-colony stimulating factor (GM-CSF) for 7 d. Exosomes were purified from the culture supernatant the following day using well-established ultracentrifugation protocols. The exosomes produced were physically homogenous, with a size distribution peaking at 80 nm in diameter as determined by nanoparticle tracking analysis (NTA) and electron microscopy. Alvarez-Erviti et al. obtained 6-12 μg of exosomes (measured based on protein concentration) per 106 cells.

[0703] Next, Alvarez-Erviti et al. investigated the possibility of loading modified exosomes with exogenous cargoes using electroporation protocols adapted for nanoscale applications. As electroporation for membrane particles at the nanometer scale is not well-characterized, nonspecific Cy5-labeled RNA was used for the empirical optimization of the electroporation protocol. The amount of encapsulated RNA was assayed after ultracentrifugation and lysis of exosomes. Electroporation at 400 V and 125 μF resulted in the greatest retention of RNA and was used for all subsequent experiments.

[0704] Alvarez-Erviti et al. administered 150 μg of each BACE1 siRNA encapsulated in 150 μg of RVG exosomes to normal C57BL/6 mice and compared the knockdown efficiency to four controls: untreated mice, mice injected with RVG exosomes only, mice injected with BACE1 siRNA complexed to an in vivo cationic liposome reagent and mice injected with BACE1 siRNA complexed to RVG-9R, the RVG peptide conjugated to 9 D-arginines that electrostatically binds to the siRNA. Cortical tissue samples were analyzed 3 d after administration and a significant protein knockdown (45%, P<0.05, versus 62%, P<0.01) in both siRNA-RVG-9R-treated and siRNARVG exosome-treated mice was observed, resulting from a significant decrease in BACE1 mRNA levels (66% [+ or −] 15%, P<0.001 and 61% [+ or −] 13% respectively, P<0.01). Moreover, Applicants demonstrated a significant decrease (55%, P<0.05) in the total [beta]-amyloid 1-42 levels, a main component of the amyloid plaques in Alzheimer's pathology, in the RVG-exosome-treated animals. The decrease observed was greater than the 0-amyloid 1-40 decrease demonstrated in normal mice after intraventricular injection of BACE1 inhibitors. Alvarez-Erviti et al. carried out 5′-rapid amplification of cDNA ends (RACE) on BACE1 cleavage product, which provided evidence of RNAi-mediated knockdown by the siRNA.

[0705] Finally, Alvarez-Erviti et al. investigated whether RNA-RVG exosomes induced immune responses in vivo by assessing IL-6, IP-10, TNFα and IFN-α serum concentrations. Following exosome treatment, nonsignificant changes in all cytokines were registered similar to siRNA-transfection reagent treatment in contrast to siRNA-RVG-9R, which potently stimulated IL-6 secretion, confirming the immunologically inert profile of the exosome treatment. Given that exosomes encapsulate only 20% of siRNA, delivery with RVG-exosome appears to be more efficient than RVG-9R delivery as comparable mRNA knockdown and greater protein knockdown was achieved with fivefold less siRNA without the corresponding level of immune stimulation. This experiment demonstrated the therapeutic potential of RVG-exosome technology, which is potentially suited for long-term silencing of genes related to neurodegenerative diseases. The exosome delivery system of Alvarez-Erviti et al. may be applied to deliver the AD-functionalized CRISPR-Cas system of the present invention to therapeutic targets, especially neurodegenerative diseases. A dosage of about 100 to 1000 mg of CRISPR Cas encapsulated in about 100 to 1000 mg of RVG exosomes may be contemplated for the present invention.

[0706] El-Andaloussi et al. (Nature Protocols 7,2112-2126(2012)) discloses how exosomes derived from cultured cells can be harnessed for delivery of RNA in vitro and in vivo. This protocol first describes the generation of targeted exosomes through transfection of an expression vector, comprising an exosomal protein fused with a peptide ligand. Next, El-Andaloussi et al. explain how to purify and characterize exosomes from transfected cell supernatant. Next, El-Andaloussi et al. detail crucial steps for loading RNA into exosomes. Finally, El-Andaloussi et al. outline how to use exosomes to efficiently deliver RNA in vitro and in vivo in mouse brain. Examples of anticipated results in which exosome-mediated RNA delivery is evaluated by functional assays and imaging are also provided. The entire protocol takes ˜3 weeks. Delivery or administration according to the invention may be performed using exosomes produced from self-derived dendritic cells. From the herein teachings, this can be employed in the practice of the invention.

[0707] In another embodiment, the plasma exosomes of Wahlgren et al. (Nucleic Acids Research, 2012, Vol. 40, No. 17 e130) are contemplated. Exosomes are nano-sized vesicles (30-90 nm in size) produced by many cell types, including dendritic cells (DC), B cells, T cells, mast cells, epithelial cells and tumor cells. These vesicles are formed by inward budding of late endosomes and are then released to the extracellular environment upon fusion with the plasma membrane. Because exosomes naturally carry RNA between cells, this property may be useful in gene therapy, and from this disclosure can be employed in the practice of the instant invention.

Exosomes from plasma can be prepared by centrifugation of buffy coat at 900 g for 20 min to isolate the plasma followed by harvesting cell supernatants, centrifuging at 300 g for 10 min to eliminate cells and at 16 500 g for 30 min followed by filtration through a 0.22 mm filter. Exosomes are pelleted by ultracentrifugation at 120 000 g for 70 min. Chemical transfection of siRNA into exosomes is carried out according to the manufacturer's instructions in RNAi Human/Mouse Starter Kit (Quiagen, Hilden, Germany). siRNA is added to 100 ml PBS at a final concentration of 2 mmol/ml. After adding HiPerFect transfection reagent, the mixture is incubated for 10 min at RT. In order to remove the excess of micelles, the exosomes are re-isolated using aldehyde/sulfate latex beads. The chemical transfection of CRISPR Cas into exosomes may be conducted similarly to siRNA. The exosomes may be co-cultured with monocytes and lymphocytes isolated from the peripheral blood of healthy donors. Therefore, it may be contemplated that exosomes containing CRISPR Cas may be introduced to monocytes and lymphocytes of and autologously reintroduced into a human. Accordingly, delivery or administration according to the invention may be performed using plasma exosomes.

### Liposomes

[0708] Delivery or administration according to the invention can be performed with liposomes. Liposomes are spherical vesicle structures composed of a uni- or multilamellar lipid bilayer surrounding internal aqueous compartments and a relatively impermeable outer lipophilic phospholipid bilayer. Liposomes have gained considerable attention as drug delivery carriers because they are biocompatible, nontoxic, can deliver both hydrophilic and lipophilic drug molecules, protect their cargo from degradation by plasma enzymes, and transport their load across biological membranes and the blood brain barrier (BBB) (see, e.g., Spuch and Navarro, Journal of Drug Delivery, vol. 2011, Article ID 469679, 12 pages, 2011. doi:10.1155/2011/469679 for review).

[0709] Liposomes can be made from several different types of lipids; however, phospholipids are most commonly used to generate liposomes as drug carriers. Although liposome formation is spontaneous when a lipid film is mixed with an aqueous solution, it can also be expedited by applying force in the form of shaking by using a homogenizer, sonicator, or an extrusion apparatus (see, e.g., Spuch and Navarro, Journal of Drug Delivery, vol. 2011, Article ID 469679, 12 pages, 2011. doi:10.1155/2011/469679 for review).

[0710] Several other additives may be added to liposomes in order to modify their structure and properties. For instance, either cholesterol or sphingomyelin may be added to the liposomal mixture in order to help stabilize the liposomal structure and to prevent the leakage of the liposomal inner cargo. Further, liposomes are prepared from hydrogenated egg phosphatidylcholine or egg phosphatidylcholine, cholesterol, and dicetyl phosphate, and their mean vesicle sizes were adjusted to about 50 and 100 nm. (see, e.g., Spuch and Navarro, Journal of Drug Delivery, vol. 2011, Article ID 469679, 12 pages, 2011. doi:10.1155/2011/469679 for review).

[0711] A liposome formulation may be mainly comprised of natural phospholipids and lipids such as 1,2-distearoryl-sn-glycero-3-phosphatidyl choline (DSPC), sphingomyelin, egg phosphatidylcholines and monosialoganglioside. Since this formulation is made up of phospholipids only, liposomal formulations have encountered many challenges, one of the ones being the instability in plasma. Several attempts to overcome these challenges have been made, specifically in the manipulation of the lipid membrane. One of these attempts focused on the manipulation of cholesterol. Addition of cholesterol to conventional formulations reduces rapid release of the encapsulated bioactive compound into the plasma or 1,2-dioleoyl-sn-glycero-3-phosphoethanolamine (DOPE) increases the stability (see, e.g., Spuch and Navarro, Journal of Drug Delivery, vol. 2011, Article ID 469679, 12 pages, 2011. doi:10.1155/2011/469679 for review).

[0712] In a particularly advantageous embodiment, Trojan Horse liposomes (also known as Molecular Trojan Horses) are desirable and protocols may be found at http://cshprotocols.cshlp.org/content/2010/4/pdb.prot5407.long. These particles allow delivery of a transgene to the entire brain after an intravascular injection. Without being bound by limitation, it is believed that neutral lipid particles with specific antibodies conjugated to surface allow crossing of the blood brain barrier via endocytosis. Trojan Horse Liposomes may be used to deliver the CRISPR family of nucleases to the brain via an intravascular injection, which would allow whole brain transgenic animals without the need for embryonic manipulation. About 1-5 g of DNA or RNA may be contemplated for in vivo administration in liposomes.

[0713] In another embodiment, the AD-functionalized CRISPR Cas system or components thereof may be administered in liposomes, such as a stable nucleic-acid-lipid particle (SNALP) (see, e.g., Morrissey et al., Nature Biotechnology, Vol. 23, No. 8, August 2005). Daily intravenous injections of about 1, 3 or 5 mg/kg/day of a specific CRISPR Cas targeted in a SNALP are contemplated. The daily treatment may be over about three days and then weekly for about five weeks. In another embodiment, a specific CRISPR Cas encapsulated SNALP) administered by intravenous injection to at doses of about 1 or 2.5 mg/kg are also contemplated (see, e.g., Zimmerman et al., Nature Letters, Vol. 441, 4 May 2006). The SNALP formulation may contain the lipids 3-N-[(wmethoxypoly(ethylene glycol) 2000) carbamoyl]-1,2-dimyristyloxy-propylamine (PEG-C-DMA), 1,2-dilinoleyloxy-N,N-dimethyl-3-aminopropane (DLinDMA), 1,2-distearoyl-sn-glycero-3-phosphocholine (DSPC) and cholesterol, in a 2:40:10:48 molar percent ratio (see, e.g., Zimmerman et al., Nature Letters, Vol. 441, 4 May 2006).

[0714] In another embodiment, stable nucleic-acid-lipid particles (SNALPs) have proven to be effective delivery molecules to highly vascularized HepG2-derived liver tumors but not in poorly vascularized HCT-116 derived liver tumors (see, e.g., Li, Gene Therapy (2012) 19, 775-780). The SNALP liposomes may be prepared by formulating D-Lin-DMA and PEG-C-DMA with distearoylphosphatidylcholine (DSPC), Cholesterol and siRNA using a 25:1 lipid/siRNA ratio and a 48/40/10/2 molar ratio of Cholesterol/D-Lin-DMA/DSPC/PEG-C-DMA. The resulted SNALP liposomes are about 80-100 nm in size.

[0715] In yet another embodiment, a SNALP may comprise synthetic cholesterol (Sigma-Aldrich, St Louis, Mo., USA), dipalmitoylphosphatidylcholine (Avanti Polar Lipids, Alabaster, Ala., USA), 3-N-[(w-methoxy poly(ethylene glycol)2000)carbamoyl]-1,2-dimyrestyloxypropylamine, and cationic 1,2-dilinoleyloxy-3-N,Ndimethylaminopropane (see, e.g., Geisbert et al., Lancet 2010; 375: 1896-905). A dosage of about 2 mg/kg total CRISPR Cas per dose administered as, for example, a bolus intravenous infusion may be contemplated.

In yet another embodiment, a SNALP may comprise synthetic cholesterol (Sigma-Aldrich), 1,2-distearoyl-sn-glycero-3-phosphocholine (DSPC; Avanti Polar Lipids Inc.), PEG-cDMA, and 1,2-dilinoleyloxy-3-(N;N-dimethyl)aminopropane (DLinDMA) (see, e.g., Judge, J. Clin. Invest. 119:661-673 (2009)). Formulations used for in vivo studies may comprise a final lipid/RNA mass ratio of about 9:1.

[0716] The safety profile of RNAi nanomedicines has been reviewed by Barros and Gollob of Alnylam Pharmaceuticals (see, e.g., Advanced Drug Delivery Reviews 64 (2012) 1730-1737). The stable nucleic acid lipid particle (SNALP) is comprised of four different lipids an ionizable lipid (DLinDMA) that is cationic at low pH, a neutral helper lipid, cholesterol, and a diffusible polyethylene glycol (PEG)-lipid. The particle is approximately 80 nm in diameter and is charge-neutral at physiologic pH. During formulation, the ionizable lipid serves to condense lipid with the anionic RNA during particle formation. When positively charged under increasingly acidic endosomal conditions, the ionizable lipid also mediates the fusion of SNALP with the endosomal membrane enabling release of RNA into the cytoplasm. The PEG-lipid stabilizes the particle and reduces aggregation during formulation, and subsequently provides a neutral hydrophilic exterior that improves pharmacokinetic properties.

[0717] To date, two clinical programs have been initiated using SNALP formulations with RNA. Tekmira Pharmaceuticals recently completed a phase I single-dose study of SNALP-ApoB in adult volunteers with elevated LDL cholesterol. ApoB is predominantly expressed in the liver and jejunum and is essential for the assembly and secretion of VLDL and LDL. Seventeen subjects received a single dose of SNALP-ApoB (dose escalation across 7 dose levels). There was no evidence of liver toxicity (anticipated as the potential dose-limiting toxicity based on preclinical studies). One (of two) subjects at the highest dose experienced flu-like symptoms consistent with immune system stimulation, and the decision was made to conclude the trial.

[0718] Alnylam Pharmaceuticals has similarly advanced ALN-TTRO1, which employs the SNALP technology described above and targets hepatocyte production of both mutant and wild-type TTR to treat TTR amyloidosis (ATTR). Three ATTR syndromes have been described: familial amyloidotic polyneuropathy (FAP) and familial amyloidotic cardiomyopathy (FAC) both caused by autosomal dominant mutations in TTR; and senile systemic amyloidosis (SSA) cause by wildtype TTR. A placebo-controlled, single dose-escalation phase I trial of ALN-TTRO1 was recently completed in patients with ATTR. ALN-TTRO1 was administered as a 15-minute IV infusion to 31 patients (23 with study drug and 8 with placebo) within a dose range of 0.01 to 1.0 mg/kg (based on siRNA). Treatment was well tolerated with no significant increases in liver function tests. Infusion-related reactions were noted in 3 of 23 patients at ≥0.4 mg/kg; all responded to slowing of the infusion rate and all continued on study. Minimal and transient elevations of serum cytokines IL-6, IP-10 and IL-ira were noted in two patients at the highest dose of 1 mg/kg (as anticipated from preclinical and NHP studies). Lowering of serum TTR, the expected pharmacodynamics effect of ALN-TTRO1, was observed at 1 mg/kg.

[0719] In yet another embodiment, a SNALP may be made by solubilizing a cationic lipid, DSPC, cholesterol and PEG-lipid e.g., in ethanol, e.g., at a molar ratio of 40:10:40:10, respectively (see, Semple et al., Nature Niotechnology, Volume 28 Number 2 Feb. 2010, pp. 172-177). The lipid mixture was added to an aqueous buffer (50 mM citrate, pH 4) with mixing to a final ethanol and lipid concentration of 30% (vol/vol) and 6.1 mg/ml, respectively, and allowed to equilibrate at 22° C. for 2 min before extrusion. The hydrated lipids were extruded through two stacked 80 nm pore-sized filters (Nuclepore) at 22° C. using a Lipex Extruder (Northern Lipids) until a vesicle diameter of 70-90 nm, as determined by dynamic light scattering analysis, was obtained. This generally required 1-3 passes. The siRNA (solubilized in a 50 mM citrate, pH 4 aqueous solution containing 30% ethanol) was added to the pre-equilibrated (35° C.) vesicles at a rate of ˜5 ml/min with mixing. After a final target siRNA/lipid ratio of 0.06 (wt/wt) was reached, the mixture was incubated for a further 30 min at 35° C. to allow vesicle reorganization and encapsulation of the siRNA. The ethanol was then removed and the external buffer replaced with PBS (155 mM NaCl, 3 mM Na2HPO4, 1 mM KH2PO4, pH 7.5) by either dialysis or tangential flow diafiltration. siRNA were encapsulated in SNALP using a controlled step-wise dilution method process. The lipid constituents of KC2-SNALP were DLin-KC2-DMA (cationic lipid), dipalmitoylphosphatidylcholine (DPPC; Avanti Polar Lipids), synthetic cholesterol (Sigma) and PEG-C-DMA used at a molar ratio of 57.1:7.1:34.3:1.4. Upon formation of the loaded particles, SNALP were dialyzed against PBS and filter sterilized through a 0.2 m filter before use. Mean particle sizes were 75-85 nm and 90-95% of the siRNA was encapsulated within the lipid particles. The final siRNA/lipid ratio in formulations used for in vivo testing was ˜0.15 (wt/wt). LNP-siRNA systems containing Factor VII siRNA were diluted to the appropriate concentrations in sterile PBS immediately before use and the formulations were administered intravenously through the lateral tail vein in a total volume of 10 ml/kg. This method and these delivery systems may be extrapolated to the AD-functionalized CRISPR Cas system of the present invention.

### Other Lipids

[0720] Other cationic lipids, such as amino lipid 2,2-dilinoleyl-4-dimethylaminoethyl-[1,3]-dioxolane (DLin-KC2-DMA) may be utilized to encapsulate CRISPR Cas or components thereof or nucleic acid molecule(s) coding therefor e.g., similar to SiRNA (see, e.g., Jayaraman, Angew. Chem. Int. Ed. 2012, 51, 8529-8533), and hence may be employed in the practice of the invention. A preformed vesicle with the following lipid composition may be contemplated: amino lipid, distearoylphosphatidylcholine (DSPC), cholesterol and (R)-2,3-bis(octadecyloxy) propyl-1-(methoxy poly(ethylene glycol)2000)propylcarbamate (PEG-lipid) in the molar ratio 40/10/40/10, respectively, and a FVII siRNA/total lipid ratio of approximately 0.05 (w/w). To ensure a narrow particle size distribution in the range of 70-90 nm and a low polydispersity index of 0.11+0.04 (n=56), the particles may be extruded up to three times through 80 nm membranes prior to adding the guide RNA. Particles containing the highly potent amino lipid 16 may be used, in which the molar ratio of the four lipid components 16, DSPC, cholesterol and PEG-lipid (50/10/38.5/1.5) which may be further optimized to enhance in vivo activity.

[0721] Michael S D Kormann et al. (“Expression of therapeutic proteins after delivery of chemically modified mRNA in mice: Nature Biotechnology, Volume:29, Pages: 154-157 (2011)) describes the use of lipid envelopes to deliver RNA. Use of lipid envelopes is also preferred in the present invention.

[0722] In another embodiment, lipids may be formulated with the AD-functionalized CRISPR Cas system of the present invention or component(s) thereof or nucleic acid molecule(s) coding therefor to form lipid nanoparticles (LNPs). Lipids include, but are not limited to, DLin-KC2-DMA4, C12-200 and colipids disteroylphosphatidyl choline, cholesterol, and PEG-DMG may be formulated with CRISPR Cas instead of siRNA (see, e.g., Novobrantseva, Molecular Therapy-Nucleic Acids (2012) 1, e4; doi:10.1038/mtna.2011.3) using a spontaneous vesicle formation procedure. The component molar ratio may be about 50/10/38.5/1.5 (DLin-KC2-DMA or C12-200/disteroylphosphatidyl choline/cholesterol/PEG-DMG). The final lipid:siRNA weight ratio may be ˜12:1 and 9:1 in the case of DLin-KC2-DMA and C12-200 lipid nanoparticles (LNPs), respectively. The formulations may have mean particle diameters of ˜80 nm with >90% entrapment efficiency. A 3 mg/kg dose may be contemplated.

Tekmira has a portfolio of approximately 95 patent families, in the U.S. and abroad, that are directed to various aspects of LNPs and LNP formulations (see, e.g., U.S. Pat. Nos. 7,982,027; 7,799,565; 8,058,069; 8,283,333; 7,901,708; 7,745,651; 7,803,397; 8,101,741; 8,188,263; 7,915,399; 8,236,943 and 7,838,658 and European Pat. Nos 1766035; 1519714; 1781593 and 1664316), all of which may be used and/or adapted to the present invention.

[0723] The AD-functionalized CRISPR Cas system or components thereof or nucleic acid molecule(s) coding therefor may be delivered encapsulated in PLGA Microspheres such as that further described in US published applications 20130252281 and 20130245107 and 20130244279 (assigned to Moderna Therapeutics) which relate to aspects of formulation of compositions comprising modified nucleic acid molecules which may encode a protein, a protein precursor, or a partially or fully processed form of the protein or a protein precursor. The formulation may have a molar ratio 50:10:38.5:1.5-3.0 (cationic lipid:fusogenic lipid:cholesterol:PEG lipid). The PEG lipid may be selected from, but is not limited to PEG-c-DOMG, PEG-DMG. The fusogenic lipid may be DSPC. See also, Schrum et al., Delivery and Formulation of Engineered Nucleic Acids, US published application 20120251618.

[0724] Nanomerics' technology addresses bioavailability challenges for a broad range of therapeutics, including low molecular weight hydrophobic drugs, peptides, and nucleic acid based therapeutics (plasmid, siRNA, miRNA). Specific administration routes for which the technology has demonstrated clear advantages include the oral route, transport across the blood-brain-barrier, delivery to solid tumours, as well as to the eye. See, e.g., Mazza et al., 2013, ACS Nano. 2013 Feb. 26; 7(2):1016-26; Uchegbu and Siew, 2013, J Pharm Sci. 102(2):305-10 and Lalatsa et al., 2012, J Control Release. 2012 Jul. 20; 161(2):523-36.

[0725] US Patent Publication No. 20050019923 describes cationic dendrimers for delivering bioactive molecules, such as polynucleotide molecules, peptides and polypeptides and/or pharmaceutical agents, to a mammalian body. The dendrimers are suitable for targeting the delivery of the bioactive molecules to, for example, the liver, spleen, lung, kidney or heart (or even the brain). Dendrimers are synthetic 3-dimensional macromolecules that are prepared in a step-wise fashion from simple branched monomer units, the nature and functionality of which can be easily controlled and varied. Dendrimers are synthesised from the repeated addition of building blocks to a multifunctional core (divergent approach to synthesis), or towards a multifunctional core (convergent approach to synthesis) and each addition of a 3-dimensional shell of building blocks leads to the formation of a higher generation of the dendrimers. Polypropylenimine dendrimers start from a diaminobutane core to which is added twice the number of amino groups by a double Michael addition of acrylonitrile to the primary amines followed by the hydrogenation of the nitriles. This results in a doubling of the amino groups. Polypropylenimine dendrimers contain 100% protonable nitrogens and up to 64 terminal amino groups (generation 5, DAB 64). Protonable groups are usually amine groups which are able to accept protons at neutral pH. The use of dendrimers as gene delivery agents has largely focused on the use of the polyamidoamine. and phosphorous containing compounds with a mixture of amine/amide or N—P(O2)S as the conjugating units respectively with no work being reported on the use of the lower generation polypropylenimine dendrimers for gene delivery. Polypropylenimine dendrimers have also been studied as pH sensitive controlled release systems for drug delivery and for their encapsulation of guest molecules when chemically modified by peripheral amino acid groups. The cytotoxicity and interaction of polypropylenimine dendrimers with DNA as well as the transfection efficacy of DAB 64 has also been studied.

[0726] US Patent Publication No. 20050019923 is based upon the observation that, contrary to earlier reports, cationic dendrimers, such as polypropylenimine dendrimers, display suitable properties, such as specific targeting and low toxicity, for use in the targeted delivery of bioactive molecules, such as genetic material. In addition, derivatives of the cationic dendrimer also display suitable properties for the targeted delivery of bioactive molecules. See also, Bioactive Polymers, US published application 20080267903, which discloses “Various polymers, including cationic polyamine polymers and dendrimeric polymers, are shown to possess anti-proliferative activity, and may therefore be useful for treatment of disorders characterised by undesirable cellular proliferation such as neoplasms and tumours, inflammatory disorders (including autoimmune disorders), psoriasis and atherosclerosis. The polymers may be used alone as active agents, or as delivery vehicles for other therapeutic agents, such as drug molecules or nucleic acids for gene therapy. In such cases, the polymers' own intrinsic anti-tumour activity may complement the activity of the agent to be delivered.” The disclosures of these patent publications may be employed in conjunction with herein teachings for delivery of AD-functionalized CRISPR Cas system(s) or component(s) thereof or nucleic acid molecule(s) coding therefor.

### Supercharged Proteins

[0727] Supercharged proteins are a class of engineered or naturally occurring proteins with unusually high positive or negative net theoretical charge and may be employed in delivery of AD-functionalized CRISPR Cas system(s) or component(s) thereof or nucleic acid molecule(s) coding therefor. Both supernegatively and superpositively charged proteins exhibit a remarkable ability to withstand thermally or chemically induced aggregation. Superpositively charged proteins are also able to penetrate mammalian cells. Associating cargo with these proteins, such as plasmid DNA, RNA, or other proteins, can enable the functional delivery of these macromolecules into mammalian cells both in vitro and in vivo. The creation and characterization of supercharged proteins has been reported in 2007 (Lawrence et al., 2007, Journal of the American Chemical Society 129, 10110-10112).

[0728] The nonviral delivery of RNA and plasmid DNA into mammalian cells are valuable both for research and therapeutic applications (Akinc et al., 2010, Nat. Biotech. 26, 561-569). Purified+36 GFP protein (or other superpositively charged protein) is mixed with RNAs in the appropriate serum-free media and allowed to complex prior addition to cells. Inclusion of serum at this stage inhibits formation of the supercharged protein-RNA complexes and reduces the effectiveness of the treatment. The following protocol has been found to be effective for a variety of cell lines (McNaughton et al., 2009, Proc. Natl. Acad. Sci. USA 106, 6111-6116) (However, pilot experiments varying the dose of protein and RNA should be performed to optimize the procedure for specific cell lines): (1) One day before treatment, plate 1×10⁵ cells per well in a 48-well plate. (2) On the day of treatment, dilute purified+36 GFP protein in serumfree media to a final concentration 200 nM. Add RNA to a final concentration of 50 nM. Vortex to mix and incubate at room temperature for 10 min. (3) During incubation, aspirate media from cells and wash once with PBS. (4) Following incubation of +36 GFP and RNA, add the protein-RNA complexes to cells. (5) Incubate cells with complexes at 37° C. for 4h. (6) Following incubation, aspirate the media and wash three times with 20 U/mL heparin PBS. Incubate cells with serum-containing media for a further 48h or longer depending upon the assay for activity. (7) Analyze cells by immunoblot, qPCR, phenotypic assay, or other appropriate method.

[0729] It has been further found+36 GFP to be an effective plasmid delivery reagent in a range of cells. As plasmid DNA is a larger cargo than siRNA, proportionately more +36 GFP protein is required to effectively complex plasmids. For effective plasmid delivery Applicants have developed a variant of +36 GFP bearing a C-terminal HA2 peptide tag, a known endosome-disrupting peptide derived from the influenza virus hemagglutinin protein. The following protocol has been effective in a variety of cells, but as above it is advised that plasmid DNA and supercharged protein doses be optimized for specific cell lines and delivery applications: (1) One day before treatment, plate 1×105 per well in a 48-well plate. (2) On the day of treatment, dilute purified 36 GFP protein in serumfree media to a final concentration 2 mM. Add 1 mg of plasmid DNA. Vortex to mix and incubate at room temperature for 10 min. (3) During incubation, aspirate media from cells and wash once with PBS. (4) Following incubation of 36 GFP and plasmid DNA, gently add the protein-DNA complexes to cells. (5) Incubate cells with complexes at 37 C for 4h. (6) Following incubation, aspirate the media and wash with PBS. Incubate cells in serum-containing media and incubate for a further 24-48h. (7) Analyze plasmid delivery (e.g., by plasmid-driven gene expression) as appropriate.

[0730] See also, e.g., McNaughton et al., Proc. Natl. Acad. Sci. USA 106, 6111-6116 (2009); Cronican et al., ACS Chemical Biology 5, 747-752 (2010); Cronican et al., Chemistry & Biology 18, 833-838 (2011); Thompson et al., Methods in Enzymology 503, 293-319 (2012); Thompson, D. B., et al., Chemistry & Biology 19 (7), 831-843 (2012). The methods of the super charged proteins may be used and/or adapted for delivery of the AD-functionalized CRISPR Cas system of the present invention. These systems in conjunction with herein teaching can be employed in the delivery of AD-functionalized CRISPR Cas system(s) or component(s) thereof or nucleic acid molecule(s) coding therefor

### Cell Penetrating Peptides (CPPs)

[0731] In yet another embodiment, cell penetrating peptides (CPPs) are contemplated for the delivery of the AD-functionalized CRISPR Cas system. CPPs are short peptides that facilitate cellular uptake of various molecular cargo (from nanosize particles to small chemical molecules and large fragments of DNA). The term “cargo” as used herein includes but is not limited to the group consisting of therapeutic agents, diagnostic probes, peptides, nucleic acids, antisense oligonucleotides, plasmids, proteins, particles, including nanoparticles, liposomes, chromophores, small molecules and radioactive materials. In aspects of the invention, the cargo may also comprise any component of the AD-functionalized CRISPR Cas system or the entire AD-functionalized functional CRISPR Cas system. Aspects of the present invention further provide methods for delivering a desired cargo into a subject comprising: (a) preparing a complex comprising the cell penetrating peptide of the present invention and a desired cargo, and (b) orally, intraarticularly, intraperitoneally, intrathecally, intrarterially, intranasally, intraparenchymally, subcutaneously, intramuscularly, intravenously, dermally, intrarectally, or topically administering the complex to a subject. The cargo is associated with the peptides either through chemical linkage via covalent bonds or through non-covalent interactions.

[0732] The function of the CPPs are to deliver the cargo into cells, a process that commonly occurs through endocytosis with the cargo delivered to the endosomes of living mammalian cells. Cell-penetrating peptides are of different sizes, amino acid sequences, and charges but all CPPs have one distinct characteristic, which is the ability to translocate the plasma membrane and facilitate the delivery of various molecular cargoes to the cytoplasm or an organelle. CPP translocation may be classified into three main entry mechanisms: direct penetration in the membrane, endocytosis-mediated entry, and translocation through the formation of a transitory structure. CPPs have found numerous applications in medicine as drug delivery agents in the treatment of different diseases including cancer and virus inhibitors, as well as contrast agents for cell labeling. Examples of the latter include acting as a carrier for GFP, MRI contrast agents, or quantum dots. CPPs hold great potential as in vitro and in vivo delivery vectors for use in research and medicine. CPPs typically have an amino acid composition that either contains a high relative abundance of positively charged amino acids such as lysine or arginine or has sequences that contain an alternating pattern of polar/charged amino acids and non-polar, hydrophobic amino acids. These two types of structures are referred to as polycationic or amphipathic, respectively. A third class of CPPs are the hydrophobic peptides, containing only apolar residues, with low net charge or have hydrophobic amino acid groups that are crucial for cellular uptake. One of the initial CPPs discovered was the trans-activating transcriptional activator (Tat) from Human Immunodeficiency Virus 1 (HIV-1) which was found to be efficiently taken up from the surrounding media by numerous cell types in culture. Since then, the number of known CPPs has expanded considerably and small molecule synthetic analogues with more effective protein transduction properties have been generated. CPPs include but are not limited to Penetratin, Tat (48-60), Transportan, and (R-AhX-R4) (Ahx=aminohexanoyl).

[0733] U.S. Pat. No. 8,372,951, provides a CPP derived from eosinophil cationic protein (ECP) which exhibits highly cell-penetrating efficiency and low toxicity. Aspects of delivering the CPP with its cargo into a vertebrate subject are also provided. Further aspects of CPPs and their delivery are described in U.S. Pat. Nos. 8,575,305; 8; 614,194 and 8,044,019. CPPs can be used to deliver the AD-functionalized CRISPR-Cas system or components thereof. That CPPs can be employed to deliver the AD-functionalized CRISPR-Cas system or components thereof is also provided in the manuscript “Gene disruption by cell-penetrating peptide-mediated delivery of Cas9 protein and guide RNA”, by Suresh Ramakrishna, Abu-Bonsrah Kwaku Dad, Jagadish Beloor, et al. Genome Res. 2014 Apr. 2, incorporated by reference in its entirety, wherein it is demonstrated that treatment with CPP-conjugated recombinant Cas9 protein and CPP-complexed guide RNAs lead to endogenous gene disruptions in human cell lines. In the paper the Cas9 protein was conjugated to CPP via a thioether bond, whereas the guide RNA was complexed with CPP, forming condensed, positively charged particles. It was shown that simultaneous and sequential treatment of human cells, including embryonic stem cells, dermal fibroblasts, HEK293T cells, HeLa cells, and embryonic carcinoma cells, with the modified Cas9 and guide RNA led to efficient gene disruptions with reduced off-target mutations relative to plasmid transfections.

### Aerosol Delivery

[0734] Subjects treated for a lung disease may for example receive pharmaceutically effective amount of aerosolized AAV vector system per lung endobronchially delivered while spontaneously breathing. As such, aerosolized delivery is preferred for AAV delivery in general. An adenovirus or an AAV particle may be used for delivery. Suitable gene constructs, each operably linked to one or more regulatory sequences, may be cloned into the delivery vector.

### Packaging and Promoters

[0735] The promoter used to drive CRISPR-Cas protein and nucleotide deaminase coding nucleic acid molecule expression can include AAV ITR, which can serve as a promoter. This is advantageous for eliminating the need for an additional promoter element (which can take up space in the vector). The additional space freed up can be used to drive the expression of additional elements (gRNA, etc.). Also, ITR activity is relatively weaker, so can be used to reduce potential toxicity due to over expression of Cas13.

[0736] For ubiquitous expression, promoters that can be used include: CMV, CAG, CBh, PGK, SV40, Ferritin heavy or light chains, etc. For brain or other CNS expression, SynapsinI can be used for all neurons, CaMKIIalpha can be used for excitatory neurons, GAD67 or GAD65 or VGAT can be used for GABAergic neurons. For liver expression, Albumin promoter can be used. For lung expression, SP—B can be used. For endothelial cells, ICAM can be used. For hematopoietic cells, IFNbeta or CD45 can be used. For Osteoblasts, the OG-2 can be used.

[0737] The promoter used to drive guide RNA can include Pol III promoters such as U6 or H1, as well as use of Pol II promoter and intronic cassettes to express guide RNA.

### Adeno Associated Virus (AAV)

[0738] The CRISPR-Cas protein, nucleotide deaminase, and one or more guide RNA can be delivered using adeno associated virus (AAV), lentivirus, adenovirus or other plasmid or viral vector types, in particular, using formulations and doses from, for example, U.S. Pat. Nos. 8,454,972 (formulations, doses for adenovirus), 8,404,658 (formulations, doses for AAV) and 5,846,946 (formulations, doses for DNA plasmids) and from clinical trials and publications regarding the clinical trials involving lentivirus, AAV and adenovirus. For examples, for AAV, the route of administration, formulation and dose can be as in U.S. Pat. No. 8,454,972 and as in clinical trials involving AAV. For Adenovirus, the route of administration, formulation and dose can be as in U.S. Pat. No. 8,404,658 and as in clinical trials involving adenovirus. For plasmid delivery, the route of administration, formulation and dose can be as in U.S. Pat. No. 5,846,946 and as in clinical studies involving plasmids. Doses may be based on or extrapolated to an average 70 kg individual (e.g. a male adult human), and can be adjusted for patients, subjects, mammals of different weight and species. Frequency of administration is within the ambit of the medical or veterinary practitioner (e.g., physician, veterinarian), depending on usual factors including the age, sex, general health, other conditions of the patient or subject and the particular condition or symptoms being addressed. The viral vectors can be injected into the tissue of interest. For cell-type specific genome modification, the expression of Cas13 and nucleotide deaminase can be driven by a cell-type specific promoter. For example, liver-specific expression might use the Albumin promoter and neuron-specific expression (e.g. for targeting CNS disorders) might use the Synapsin I promoter.

[0739] In terms of in vivo delivery, AAV is advantageous over other viral vectors for a couple of reasons: low toxicity (this may be due to the purification method not requiring ultra centrifugation of cell particles that can activate the immune response); and low probability of causing insertional mutagenesis because it doesn't integrate into the host genome.

[0740] AAV has a packaging limit of 4.5 or 4.75 Kb. This means that Cas13 as well as a promoter and transcription terminator have to be all fit into the same viral vector. Constructs larger than 4.5 or 4.75 Kb will lead to significantly reduced virus production. SpCas9 is quite large, the gene itself is over 4.1 Kb, which makes it difficult for packing into AAV. Therefore embodiments of the invention include utilizing homologs of Cas13 that are shorter.

[0741] As to AAV, the AAV can be AAV1, AAV2, AAV5 or any combination thereof. One can select the AAV of the AAV with regard to the cells to be targeted; e.g., one can select AAV serotypes 1, 2, 5 or a hybrid capsid AAV1, AAV2, AAV5 or any combination thereof for targeting brain or neuronal cells; and one can select AAV4 for targeting cardiac tissue. AAV8 is useful for delivery to the liver. The herein promoters and vectors are preferred individually. A tabulation of certain AAV serotypes as to these cells (see Grimm, D. et al, J. Virol. 82: 5887-5911 (2008)) is as follows:

| | Cell Line | | | | | | | |
|---|---|---|---|---|---|---|---|---|
| | AAV- | AAV- | AAV- | AAV- | AAV- | AAV- | AAV- | AAV- |
| | 1 | 2 | 3 | 4 | 5 | 6 | 8 | 9 |
| Huh-7 | 13 | 100 | 2.5 | 0.0 | 0.1 | 10 | 0.7 | 0.0 |
| HEK293 | 25 | 100 | 2.5 | 0.1 | 0.1 | 5 | 0.7 | 0.1 |
| HeLa | 3 | 100 | 2.0 | 0.1 | 6.7 | 1 | 0.2 | 0.1 |
| HepG2 | 3 | 100 | 16.7 | 0.3 | 1.7 | 5 | 0.3 | ND |
| Hep1A | 20 | 100 | 0.2 | 1.0 | 0.1 | 1 | 0.2 | 0.0 |
| 911 | 17 | 100 | 11 | 0.2 | 0.1 | 17 | 0.1 | ND |
| CHO | 100 | 100 | 14 | 1.4 | 333 | 50 | 10 | 1.0 |
| COS | 33 | 100 | 33 | 3.3 | 5.0 | 14 | 2.0 | 0.5 |
| MeWo | 10 | 100 | 20 | 0.3 | 6.7 | 10 | 1.0 | 0.2 |
| NIH3T3 | 10 | 100 | 2.9 | 2.9 | 0.3 | 10 | 0.3 | ND |
| A549 | 14 | 100 | 20 | ND | 0.5 | 10 | 0.5 | 0.1 |
| HT1180 | 20 | 100 | 10 | 0.1 | 0.3 | 33 | 0.5 | 0.1 |
| Monocytes | 1111 | 100 | ND | ND | 125 | 1429 | ND | ND |
| Immature | 2500 | 100 | ND | ND | 222 | 2857 | ND | ND |
| DC | | | | | | | | |
| Mature DC | 2222 | 100 | ND | ND | 333 | 3333 | ND | ND |

### Lentiviruses

[0742] Lentiviruses are complex retroviruses that have the ability to infect and express their genes in both mitotic and post-mitotic cells. The most commonly known lentivirus is the human immunodeficiency virus (HIV), which uses the envelope glycoproteins of other viruses to target a broad range of cell types.

[0743] Lentiviruses may be prepared as follows. After cloning pCasES10 (which contains a lentiviral transfer plasmid backbone), HEK293FT at low passage (p=5) were seeded in a T-75 flask to 50% confluence the day before transfection in DMEM with 10% fetal bovine serum and without antibiotics. After 20 hours, media was changed to OptiMEM (serum-free) media and transfection was done 4 hours later. Cells were transfected with 10 μg of lentiviral transfer plasmid (pCasES10) and the following packaging plasmids: 5 μg of pMD2.G (VSV-g pseudotype), and 7.5 ug of psPAX2 (gag/pol/rev/tat). Transfection was done in 4 mL OptiMEM with a cationic lipid delivery agent (50 uL Lipofectamine 2000 and 100 ul Plus reagent). After 6 hours, the media was changed to antibiotic-free DMEM with 10% fetal bovine serum. These methods use serum during cell culture, but serum-free methods are preferred.

[0744] Lentivirus may be purified as follows. Viral supernatants were harvested after 48 hours. Supernatants were first cleared of debris and filtered through a 0.45 um low protein binding (PVDF) filter. They were then spun in a ultracentrifuge for 2 hours at 24,000 rpm. Viral pellets were resuspended in 50 ul of DMEM overnight at 4C. They were then aliquotted and immediately frozen at −80° C.

[0745] In another embodiment, minimal non-primate lentiviral vectors based on the equine infectious anemia virus (EIAV) are also contemplated, especially for ocular gene therapy (see, e.g., Balagaan, J Gene Med 2006; 8: 275-285). In another embodiment, RetinoStat®, an equine infectious anemia virus-based lentiviral gene therapy vector that expresses angiostatic proteins endostatin and angiostatin that is delivered via a subretinal injection for the treatment of the web form of age-related macular degeneration is also contemplated (see, e.g., Binley et al., HUMAN GENE THERAPY 23:980-991 (September 2012)) and this vector may be modified for the AD-functionalized CRISPR-Cas system of the present invention.

[0746] In another embodiment, self-inactivating lentiviral vectors with an siRNA targeting a common exon shared by HIV tat/rev, a nucleolar-localizing TAR decoy, and an anti-CCR5-specific hammerhead ribozyme (see, e.g., DiGiusto et al. (2010) Sci Transl Med 2:36ra43) may be used/and or adapted to the AD-functionalized CRISPR-Cas system of the present invention. A minimum of 2.5×106 CD34+ cells per kilogram patient weight may be collected and prestimulated for 16 to 20 hours in X-VIVO 15 medium (Lonza) containing 2 μmol/L-glutamine, stem cell factor (100 ng/ml), Flt-3 ligand (Flt-3L) (100 ng/ml), and thrombopoietin (10 ng/ml) (CellGenix) at a density of 2×106 cells/ml. Prestimulated cells may be transduced with lentiviral at a multiplicity of infection of 5 for 16 to 24 hours in 75-cm2 tissue culture flasks coated with fibronectin (25 mg/cm2) (RetroNectin, Takara Bio Inc.).

[0747] Lentiviral vectors have been disclosed as in the treatment for Parkinson's Disease, see, e.g., US Patent Publication No. 20120295960 and U.S. Pat. Nos. 7,303,910 and 7,351,585. Lentiviral vectors have also been disclosed for the treatment of ocular diseases, see e.g., US Patent Publication Nos. 20060281180, 20090007284, US20110117189; US20090017543; US20070054961, US20100317109. Lentiviral vectors have also been disclosed for delivery to the brain, see, e.g., US Patent Publication Nos. US20110293571; US20110293571, US20040013648, US20070025970, US20090111106 and U.S. Pat. No. 7,259,015.

### Applications

[0748] Therapeutic Targeting with Ad-Functionalized Crispr System

[0749] As will be apparent, it is envisaged that AD-functionalized CRISPR system can be used to target any polynucleotide sequence of interest. The invention provides a non-naturally occurring or engineered composition, or one or more polynucleotides encoding components of said composition, or vector or delivery systems comprising one or more polynucleotides encoding components of said composition for use in a modifying a target cell in vivo, ex vivo or in vitro and, may be conducted in a manner alters the cell such that once modified the progeny or cell line of the CRISPR modified cell retains the altered phenotype. The modified cells and progeny may be part of a multi-cellular organism such as a plant or animal with ex vivo or in vivo application of CRISPR system to desired cell types. The CRISPR invention may be a therapeutic method of treatment. The therapeutic method of treatment may comprise gene or genome editing, or gene therapy.

### Adoptive Cell Therapies

[0750] The present invention also contemplates use of the AD-functionalized CRISPR system described herein to modify cells for adoptive therapies. Aspects of the invention accordingly involve the adoptive transfer of immune system cells, such as T cells, specific for selected antigens, such as tumor associated antigens (see Maus et al., 2014, Adoptive Immunotherapy for Cancer or Viruses, Annual Review of Immunology, Vol. 32: 189-225; Rosenberg and Restifo, 2015, Adoptive cell transfer as personalized immunotherapy for human cancer, Science Vol. 348 no. 6230 pp. 62-68; and, Restifo et al., 2015, Adoptive immunotherapy for cancer: harnessing the T cell response. Nat. Rev. Immunol. 12(4): 269-281; and Jenson and Riddell, 2014, Design and implementation of adoptive therapy with chimeric antigen receptor-modified T cells. Immunol Rev. 257(1): 127-144). Various strategies may for example be employed to genetically modify T cells by altering the specificity of the T cell receptor (TCR) for example by introducing new TCR a and Rchains with selected peptide specificity (see U.S. Pat. No. 8,697,854; PCT Patent Publications: WO2003020763, WO2004033685, WO2004044004, WO2005114215, WO2006000830, WO2008038002, WO2008039818, WO2004074322, WO2005113595, WO2006125962, WO2013166321, WO2013039889, WO2014018863, WO2014083173; U.S. Pat. No. 8,088,379).

[0751] As an alternative to, or addition to, TCR modifications, chimeric antigen receptors (CARs) may be used in order to generate immunoresponsive cells, such as T cells, specific for selected targets, such as malignant cells, with a wide variety of receptor chimera constructs having been described (see U.S. Pat. Nos. 5,843,728; 5,851,828; 5,912,170; 6,004,811; 6,284,240; 6,392,013; 6,410,014; 6,753,162; 8,211,422; and, PCT Publication WO9215322). Alternative CAR constructs may be characterized as belonging to successive generations. First-generation CARs typically consist of a single-chain variable fragment of an antibody specific for an antigen, for example comprising a VL linked to a VH of a specific antibody, linked by a flexible linker, for example by a CD8α hinge domain and a CD8α transmembrane domain, to the transmembrane and intracellular signaling domains of either CD3ζ or FcRγ (scFv-CD3ζ or scFv-FcRγ; see U.S. Pat. Nos. 7,741,465; 5,912,172; 5,906,936). Second-generation CARs incorporate the intracellular domains of one or more costimulatory molecules, such as CD28, OX40 (CD134), or 4-1BB (CD137) within the endodomain (for example scFv-CD28/OX40/4-1BB-CD3ζ; see U.S. Pat. Nos. 8,911,993; 8,916,381; 8,975,071; 9,101,584; 9,102,760; 9,102,761). Third-generation CARs include a combination of costimulatory endodomains, such a CD3ζ-chain, CD97, GDI 1a-CD18, CD2, ICOS, CD27, CD154, CDS, OX40, 4-1BB, or CD28 signaling domains (for example scFv-CD28-4-1BB-CD3(or scFv-CD28-OX40-CD3ζ; see U.S. Pat. Nos. 8,906,682; 8,399,645; 5,686,281; PCT Publication No.

[0752] WO2014134165; PCT Publication No. WO2012079000). Alternatively, costimulation may be orchestrated by expressing CARs in antigen-specific T cells, chosen so as to be activated and expanded following engagement of their native aPTCR, for example by antigen on professional antigen-presenting cells, with attendant costimulation. In addition, additional engineered receptors may be provided on the immunoresponsive cells, for example to improve targeting of a T-cell attack and/or minimize side effects.

[0753] Alternative techniques may be used to transform target immunoresponsive cells, such as protoplast fusion, lipofection, transfection or electroporation. A wide variety of vectors may be used, such as retroviral vectors, lentiviral vectors, adenoviral vectors, adeno-associated viral vectors, plasmids or transposons, such as a Sleeping Beauty transposon (see U.S. Pat. Nos. 6,489,458; 7,148,203; 7,160,682; 7,985,739; 8,227,432), may be used to introduce CARs, for example using 2nd generation antigen-specific CARs signaling through CD3ζ (and either CD28 or CD137. Viral vectors may for example include vectors based on HIV, SV40, EBV, HSV or BPV.

[0754] Cells that are targeted for transformation may for example include T cells, Natural Killer (NK) cells, cytotoxic T lymphocytes (CTL), regulatory T cells, human embryonic stem cells, tumor-infiltrating lymphocytes (TIL) or a pluripotent stem cell from which lymphoid cells may be differentiated. T cells expressing a desired CAR may for example be selected through co-culture with γ-irradiated activating and propagating cells (AaPC), which co-express the cancer antigen and co-stimulatory molecules. The engineered CAR T-cells may be expanded, for example by co-culture on AaPC in presence of soluble factors, such as IL-2 and IL-21. This expansion may for example be carried out so as to provide memory CAR+ T cells (which may for example be assayed by non-enzymatic digital array and/or multi-panel flow cytometry). In this way, CAR T cells may be provided that have specific cytotoxic activity against antigen-bearing tumors (optionally in conjunction with production of desired chemokines such as interferon-γ). CAR T cells of this kind may for example be used in animal models, for example to threat tumor xenografts.

[0755] Approaches such as the foregoing may be adapted to provide methods of treating and/or increasing survival of a subject having a disease, such as a neoplasia, for example by administering an effective amount of an immunoresponsive cell comprising an antigen recognizing receptor that binds a selected antigen, wherein the binding activates the immunoreponsive cell, thereby treating or preventing the disease (such as a neoplasia, a pathogen infection, an autoimmune disorder, or an allogeneic transplant reaction). Dosing in CAR T cell therapies may for example involve administration of from 106 to 109 cells/kg, with or without a course of lymphodepletion, for example with cyclophosphamide.

[0756] In one embodiment, the treatment can be administrated into patients undergoing an immunosuppressive treatment. The cells or population of cells, may be made resistant to at least one immunosuppressive agent due to the inactivation of a gene encoding a receptor for such immunosuppressive agent. Not being bound by a theory, the immunosuppressive treatment should help the selection and expansion of the immunoresponsive or T cells according to the invention within the patient.

[0757] The administration of the cells or population of cells according to the present invention may be carried out in any convenient manner, including by aerosol inhalation, injection, ingestion, transfusion, implantation or transplantation. The cells or population of cells may be administered to a patient subcutaneously, intradermally, intratumorally, intranodally, intramedullary, intramuscularly, by intravenous or intralymphatic injection, or intraperitoneally. In one embodiment, the cell compositions of the present invention are preferably administered by intravenous injection.

[0758] The administration of the cells or population of cells can consist of the administration of 104-109 cells per kg body weight, preferably 105 to 106 cells/kg body weight including all integer values of cell numbers within those ranges. Dosing in CAR T cell therapies may for example involve administration of from 106 to 109 cells/kg, with or without a course of lymphodepletion, for example with cyclophosphamide. The cells or population of cells can be administrated in one or more doses. In another embodiment, the effective amount of cells are administrated as a single dose. In another embodiment, the effective amount of cells are administrated as more than one dose over a period time. Timing of administration is within the judgment of managing physician and depends on the clinical condition of the patient. The cells or population of cells may be obtained from any source, such as a blood bank or a donor. While individual needs vary, determination of optimal ranges of effective amounts of a given cell type for a particular disease or conditions are within the skill of one in the art. An effective amount means an amount which provides a therapeutic or prophylactic benefit. The dosage administrated will be dependent upon the age, health and weight of the recipient, kind of concurrent treatment, if any, frequency of treatment and the nature of the effect desired.

[0759] In another embodiment, the effective amount of cells or composition comprising those cells are administrated parenterally. The administration can be an intravenous administration. The administration can be directly done by injection within a tumor.

[0760] To guard against possible adverse reactions, engineered immunoresponsive cells may be equipped with a transgenic safety switch, in the form of a transgene that renders the cells vulnerable to exposure to a specific signal. For example, the herpes simplex viral thymidine kinase (TK) gene may be used in this way, for example by introduction into allogeneic T lymphocytes used as donor lymphocyte infusions following stem cell transplantation (Greco, et al., Improving the safety of cell therapy with the TK-suicide gene. Front. Pharmacol. 2015; 6: 95). In such cells, administration of a nucleoside prodrug such as ganciclovir or acyclovir causes cell death. Alternative safety switch constructs include inducible caspase 9, for example triggered by administration of a small-molecule dimerizer that brings together two nonfunctional icasp9 molecules to form the active enzyme. A wide variety of alternative approaches to implementing cellular proliferation controls have been described (see U.S. Patent Publication No. 20130071414; PCT Patent Publication WO2011146862; PCT Patent Publication WO2014011987; PCT Patent Publication WO2013040371; Zhou et al. BLOOD, 2014, 123/25:3895-3905; Di Stasi et al., The New England Journal of Medicine 2011; 365:1673-1683; Sadelain M, The New England Journal of Medicine 2011; 365:1735-173; Ramos et al., Stem Cells 28(6):1107-15 (2010)).

[0761] In a further refinement of adoptive therapies, genome editing with a AD-functionalized CRISPR-Cas system as described herein may be used to tailor immunoresponsive cells to alternative implementations, for example providing edited CAR T cells (see Poirot et al., 2015, Multiplex genome edited T-cell manufacturing platform for “off-the-shelf” adoptive T-cell immunotherapies, Cancer Res 75 (18): 3853). For example, immunoresponsive cells may be edited to delete expression of some or all of the class of HLA type II and/or type I molecules, or to knockout selected genes that may inhibit the desired immune response, such as the PD1 gene.

[0762] Cells may be edited using an AD-functionalized CRISPR system as described herein. AD-functionalized CRISPR systems may be delivered to an immune cell by any method described herein. In preferred embodiments, cells are edited ex vivo and transferred to a subject in need thereof. Immunoresponsive cells, CAR-T cells or any cells used for adoptive cell transfer may be edited. Editing may be performed to eliminate potential alloreactive T-cell receptors (TCR), disrupt the target of a chemotherapeutic agent, block an immune checkpoint, activate a T cell, and/or increase the differentiation and/or proliferation of functionally exhausted or dysfunctional CD8+ T-cells (see PCT Patent Publications: WO2013176915, WO2014059173, WO2014172606, WO2014184744, and WO2014191128). Editing may result in inactivation of a gene.

[0763] T cell receptors (TCR) are cell surface receptors that participate in the activation of T cells in response to the presentation of antigen. The TCR is generally made from two chains, α and β, which assemble to form a heterodimer and associates with the CD3-transducing subunits to form the T cell receptor complex present on the cell surface. Each α and β chain of the TCR consists of an immunoglobulin-like N-terminal variable (V) and constant (C) region, a hydrophobic transmembrane domain, and a short cytoplasmic region. As for immunoglobulin molecules, the variable region of the α and β chains are generated by V(D)J recombination, creating a large diversity of antigen specificities within the population of T cells. However, in contrast to immunoglobulins that recognize intact antigen, T cells are activated by processed peptide fragments in association with an MHC molecule, introducing an extra dimension to antigen recognition by T cells, known as MHC restriction. Recognition of MHC disparities between the donor and recipient through the T cell receptor leads to T cell proliferation and the potential development of graft versus host disease (GVHD). The inactivation of TCRα or TCRβ can result in the elimination of the TCR from the surface of T cells preventing recognition of alloantigen and thus GVHD. However, TCR disruption generally results in the elimination of the CD3 signaling component and alters the means of further T cell expansion.

[0764] Allogeneic cells are rapidly rejected by the host immune system. It has been demonstrated that, allogeneic leukocytes present in non-irradiated blood products will persist for no more than 5 to 6 days (Boni, Muranski et al. 2008 Blood 1; 112(12):4746-54). Thus, to prevent rejection of allogeneic cells, the host's immune system usually has to be suppressed to some extent. However, in the case of adoptive cell transfer the use of immunosuppressive drugs also have a detrimental effect on the introduced therapeutic T cells. Therefore, to effectively use an adoptive immunotherapy approach in these conditions, the introduced cells would need to be resistant to the immunosuppressive treatment. Thus, in a particular embodiment, the present invention further comprises a step of modifying T cells to make them resistant to an immunosuppressive agent, preferably by inactivating at least one gene encoding a target for an immunosuppressive agent. An immunosuppressive agent is an agent that suppresses immune function by one of several mechanisms of action. An immunosuppressive agent can be, but is not limited to a calcineurin inhibitor, a target of rapamycin, an interleukin-2 receptor α-chain blocker, an inhibitor of inosine monophosphate dehydrogenase, an inhibitor of dihydrofolic acid reductase, a corticosteroid or an immunosuppressive antimetabolite. The present invention allows conferring immunosuppressive resistance to T cells for immunotherapy by inactivating the target of the immunosuppressive agent in T cells. As non-limiting examples, targets for an immunosuppressive agent can be a receptor for an immunosuppressive agent such as: CD52, glucocorticoid receptor (GR), a FKBP family gene member and a cyclophilin family gene member.

[0765] Immune checkpoints are inhibitory pathways that slow down or stop immune reactions and prevent excessive tissue damage from uncontrolled activity of immune cells. In certain embodiments, the immune checkpoint targeted is the programmed death-1 (PD-1 or CD279) gene (PDCD1). In other embodiments, the immune checkpoint targeted is cytotoxic T-lymphocyte-associated antigen (CTLA-4). In additional embodiments, the immune checkpoint targeted is another member of the CD28 and CTLA4 Ig superfamily such as BTLA, LAG3, ICOS, PDL1 or KIR. In further additional embodiments, the immune checkpoint targeted is a member of the TNFR superfamily such as CD40, OX40, CD137, GITR, CD27 or TIM-3.

[0766] Additional immune checkpoints include Src homology 2 domain-containing protein tyrosine phosphatase 1 (SHP-1) (Watson H A, et al., SHP-1: the next checkpoint target for cancer immunotherapy? Biochem Soc Trans. 2016 Apr. 15; 44(2):356-62). SHP-1 is a widely expressed inhibitory protein tyrosine phosphatase (PTP). In T-cells, it is a negative regulator of antigen-dependent activation and proliferation. It is a cytosolic protein, and therefore not amenable to antibody-mediated therapies, but its role in activation and proliferation makes it an attractive target for genetic manipulation in adoptive transfer strategies, such as chimeric antigen receptor (CAR) T cells. Immune checkpoints may also include T cell immunoreceptor with Ig and ITIM domains (TIGIT/Vstm3/WUCAM/VSIG9) and VISTA (Le Mercier I, et al., (2015) Beyond CTLA-4 and PD-1, the generation Z of negative checkpoint regulators. Front. Immunol. 6:418).

[0767] WO2014172606 relates to the use of MT and/or MT inhibitors to increase proliferation and/or activity of exhausted CD8+ T-cells and to decrease CD8+ T-cell exhaustion (e.g., decrease functionally exhausted or unresponsive CD8+ immune cells). In certain embodiments, metallothioneins are targeted by gene editing in adoptively transferred T cells.

[0768] In certain embodiments, targets of gene editing may be at least one targeted locus involved in the expression of an immune checkpoint protein. Such targets may include, but are not limited to CTLA4, PPP2CA, PPP2CB, PTPN6, PTPN22, PDCD1, ICOS (CD278), PDL1, KIR, LAG3, HAVCR2, BTLA, CD160, TIGIT, CD96, CRTAM, LAIR1, SIGLEC7, SIGLEC9, CD244 (2B4), TNFRSF10B, TNFRSF10A, CASP8, CASP10, CASP3, CASP6, CASP7, FADD, FAS, TGFBRII, TGFRBRI, SMAD2, SMAD3, SMAD4, SMAD10, SKI, SKIL, TGIF1, IL10RA, IL10RB, HMOX2, IL6R, IL6ST, EIF2AK4, CSK, PAG1, SIT1, FOXP3, PRDM1, BATF, VISTA, GUCYlA2, GUCYlA3, GUCYlB2, GUCYlB3, MT1, MT2, CD40, OX40, CD137, GITR, CD27, SHP-1 or TIM-3. In preferred embodiments, the gene locus involved in the expression of PD-1 or CTLA-4 genes is targeted. In other preferred embodiments, combinations of genes are targeted, such as but not limited to PD-1 and TIGIT.

[0769] In other embodiments, at least two genes are edited. Pairs of genes may include, but are not limited to PD1 and TCRa, PD1 and TCRP, CTLA-4 and TCRa, CTLA-4 and TCRP, LAG3 and TCRa, LAG3 and TCRP, Tim3 and TCRa, Tim3 and TCRP, BTLA and TCRa, BTLA and TCRP, BY55 and TCRa, BY55 and TCRP, TIGIT and TCRa, TIGIT and TCRP, B7H5 and TCRa, B7H5 and TCRP, LAIR1 and TCRa, LAIR1 and TCRP, SIGLEC10 and TCRa, SIGLEC10 and TCRP, 2B4 and TCRa, 2B4 and TCRP.

[0770] Whether prior to or after genetic modification of the T cells, the T cells can be activated and expanded generally using methods as described, for example, in U.S. Pat. Nos. 6,352,694; 6,534,055; 6,905,680; 5,858,358; 6,887,466; 6,905,681; 7,144,575; 7,232,566; 7,175,843; 5,883,223; 6,905,874; 6,797,514; 6,867,041; and 7,572,631. T cells can be expanded in vitro or in vivo.

[0771] The practice of the present invention employs techniques known in the field of immunology, biochemistry, chemistry, molecular biology, microbiology, cell biology, genomics and recombinant DNA, which are within the skill of the art. See MOLECULAR CLONING: A LABORATORY MANUAL, 2nd edition (1989) (Sambrook, Fritsch and Maniatis); MOLECULAR CLONING: A LABORATORY MANUAL, 4th edition (2012) (Green and Sambrook); CURRENT PROTOCOLS IN MOLECULAR BIOLOGY (1987) (F.

[0772] M. Ausubel, et al. eds.); the series METHODS IN ENZYMOLOGY (Academic Press, Inc.); PCR 2: A PRACTICAL APPROACH (1995) (M. J. MacPherson, B. D. Hames and G. R. Taylor eds.); ANTIBODIES, A LABORATORY MANUAL (1988) (Harlow and Lane, eds.); ANTIBODIES A LABORATORY MANUAL, 2nd edition (2013) (E. A. Greenfield ed.); and ANIMAL CELL CULTURE (1987) (R. I. Freshney, ed.).

### Ad-Functionalized Crispr System can be Used in Non-Human Animals

[0773] In an aspect, the invention provides a non-human eukaryotic organism; preferably a multicellular eukaryotic organism, comprising a eukaryotic host cell according to any of the described embodiments. In other aspects, the invention provides a eukaryotic organism; preferably a multicellular eukaryotic organism, comprising a eukaryotic host cell according to any of the described embodiments. The organism in some embodiments of these aspects may be an animal; for example a mammal. Also, the organism may be an arthropod such as an insect. The present invention may also be extended to other agricultural applications such as, for example, farm and production animals. For example, pigs have many features that make them attractive as biomedical models, especially in regenerative medicine. In particular, pigs with severe combined immunodeficiency (SCID) may provide useful models for regenerative medicine, xenotransplantation (discussed also elsewhere herein), and tumor development and will aid in developing therapies for human SCID patients. Lee et al., (Proc Natl Acad Sci USA. 2014 May 20; 111(20):7260-5) utilized a reporter-guided transcription activator-like effector nuclease (TALEN) system to generated targeted modifications of recombination activating gene (RAG) 2 in somatic cells at high efficiency, including some that affected both alleles. The AD-functionalized CRISPR system may be applied to a similar system.

[0774] The methods of Lee et al., (Proc Natl Acad Sci USA. 2014 May 20; 111(20):7260-5) may be applied to the present invention analogously as follows. Mutated pigs are produced by targeted modification of RAG2 in fetal fibroblast cells followed by SCNT and embryo transfer. Constructs coding for CRISPR Cas and a reporter are electroporated into fetal-derived fibroblast cells. After 48 h, transfected cells expressing the green fluorescent protein are sorted into individual wells of a 96-well plate at an estimated dilution of a single cell per well. Targeted modification of RAG2 are screened by amplifying a genomic DNA fragment flanking any CRISPR Cas cutting sites followed by sequencing the PCR products. After screening and ensuring lack of off-site mutations, cells carrying targeted modification of RAG2 are used for SCNT. The polar body, along with a portion of the adjacent cytoplasm of oocyte, presumably containing the metaphase II plate, are removed, and a donor cell are placed in the perivitelline. The reconstructed embryos are then electrically porated to fuse the donor cell with the oocyte and then chemically activated. The activated embryos are incubated in Porcine Zygote Medium 3 (PZM3) with 0.5 μM Scriptaid (S7817; Sigma-Aldrich) for 14-16 h. Embryos are then washed to remove the Scriptaid and cultured in PZM3 until they were transferred into the oviducts of surrogate pigs.

[0775] The present invention is also applicable to modifying SNPs of other animals, such as cows. Tan et al. (Proc Natl Acad Sci USA. 2013 Oct. 8; 110(41): 16526-16531) expanded the livestock gene editing toolbox to include transcription activator-like (TAL) effector nuclease (TALEN)- and clustered regularly interspaced short palindromic repeats (CRISPR)/Cas9-stimulated homology-directed repair (HDR) using plasmid, rAAV, and oligonucleotide templates. Gene specific guide RNA sequences were cloned into the Church lab guide RNA vector (Addgene ID: 41824) according to their methods (Mali P, et al. (2013) RNA-Guided Human Genome Engineering via Cas9. Science 339(6121):823-826). The Cas9 nuclease was provided either by co-transfection of the hCas9 plasmid (Addgene ID: 41815) or mRNA synthesized from RCIScript-hCas9. This RCIScript-hCas9 was constructed by sub-cloning the XbaI-AgeI fragment from the hCas9 plasmid (encompassing the hCas9 cDNA) into the RCIScript plasmid.

[0776] Heo et al. (Stem Cells Dev. 2015 Feb. 1; 24(3):393-402. doi: 10.1089/scd.2014.0278. Epub 2014 Nov. 3) reported highly efficient gene targeting in the bovine genome using bovine pluripotent cells and clustered regularly interspaced short palindromic repeat (CRISPR)/Cas9 nuclease. First, Heo et al. generate induced pluripotent stem cells (iPSCs) from bovine somatic fibroblasts by the ectopic expression of yamanaka factors and GSK30 and MEK inhibitor (2i) treatment. Heo et al. observed that these bovine iPSCs are highly similar to naïve pluripotent stem cells with regard to gene expression and developmental potential in teratomas. Moreover, CRISPR-Cas9 nuclease, which was specific for the bovine NANOG locus, showed highly efficient editing of the bovine genome in bovine iPSCs and embryos.

[0777] Igenity® provides a profile analysis of animals, such as cows, to perform and transmit traits of economic traits of economic importance, such as carcass composition, carcass quality, maternal and reproductive traits and average daily gain. The analysis of a comprehensive Igenity® profile begins with the discovery of DNA markers (most often single nucleotide polymorphisms or SNPs). All the markers behind the Igenity® profile were discovered by independent scientists at research institutions, including universities, research organizations, and government entities such as USDA. Markers are then analyzed at Igenity® in validation populations. Igenity® uses multiple resource populations that represent various production environments and biological types, often working with industry partners from the seedstock, cow-calf, feedlot and/or packing segments of the beef industry to collect phenotypes that are not commonly available. Cattle genome databases are widely available, see, e.g., the NAGRP Cattle Genome Coordination Program (http://www.animalgenome.org/cattle/maps/db.html). Thus, the present invention maybe applied to target bovine SNPs. One of skill in the art may utilize the above protocols for targeting SNPs and apply them to bovine SNPs as described, for example, by Tan et al. or Heo et al.

[0778] Qingjian Zou et al. (Journal of Molecular Cell Biology Advance Access published Oct. 12, 2015) demonstrated increased muscle mass in dogs by targeting the first exon of the dog Myostatin (MSTN) gene (a negative regulator of skeletal muscle mass). First, the efficiency of the sgRNA was validated, using cotransfection of the sgRNA targeting MSTN with a Cas9 vector into canine embryonic fibroblasts (CEFs). Thereafter, MSTN KO dogs were generated by micro-injecting embryos with normal morphology with a mixture of Cas9 mRNA and MSTN sgRNA and auto-transplantation of the zygotes into the oviduct of the same female dog. The knock-out puppies displayed an obvious muscular phenotype on thighs compared with its wild-type littermate sister. This can also be performed using the AD-functionalized CRISPR systems provided herein.

### Livestock—Pigs

[0779] Viral targets in livestock may include, in some embodiments, porcine CD163, for example on porcine macrophages. CD163 is associated with infection (thought to be through viral cell entry) by PRRSv (Porcine Reproductive and Respiratory Syndrome virus, an arterivirus). Infection by PRRSv, especially of porcine alveolar macrophages (found in the lung), results in a previously incurable porcine syndrome (“Mystery swine disease” or “blue ear disease”) that causes suffering, including reproductive failure, weight loss and high mortality rates in domestic pigs. Opportunistic infections, such as enzootic pneumonia, meningitis and ear oedema, are often seen due to immune deficiency through loss of macrophage activity. It also has significant economic and environmental repercussions due to increased antibiotic use and financial loss (an estimated $660m per year).

[0780] As reported by Kristin M Whitworth and Dr Randall Prather et al. (Nature Biotech 3434 published online 7 Dec. 2015) at the University of Missouri and in collaboration with Genus Plc, CD163 was targeted using CRISPR-Cas9 and the offspring of edited pigs were resistant when exposed to PRRSv. One founder male and one founder female, both of whom had mutations in exon 7 of CD163, were bred to produce offspring. The founder male possessed an 11-bp deletion in exon 7 on one allele, which results in a frameshift mutation and missense translation at amino acid 45 in domain 5 and a subsequent premature stop codon at amino acid 64. The other allele had a 2-bp addition in exon 7 and a 377-bp deletion in the preceding intron, which were predicted to result in the expression of the first 49 amino acids of domain 5, followed by a premature stop code at amino acid 85. The sow had a 7 bp addition in one allele that when translated was predicted to express the first 48 amino acids of domain 5, followed by a premature stop codon at amino acid 70. The sow's other allele was unamplifiable. Selected offspring were predicted to be a null animal (CD163−/−), i.e. a CD163 knock out.

[0781] Accordingly, in some embodiments, porcine alveolar macrophages may be targeted by the CRISPR protein. In some embodiments, porcine CD163 may be targeted by the CRISPR protein. In some embodiments, porcine CD163 may be knocked out through induction of a DSB or through insertions or deletions, for example targeting deletion or modification of exon 7, including one or more of those described above, or in other regions of the gene, for example deletion or modification of exon 5.

[0782] An edited pig and its progeny are also envisaged, for example a CD163 knock out pig. This may be for livestock, breeding or modelling purposes (i.e. a porcine model). Semen comprising the gene knock out is also provided.

[0783] CD163 is a member of the scavenger receptor cysteine-rich (SRCR) superfamily. Based on in vitro studies SRCR domain 5 of the protein is the domain responsible for unpackaging and release of the viral genome. As such, other members of the SRCR superfamily may also be targeted in order to assess resistance to other viruses. PRRSV is also a member of the mammalian arterivirus group, which also includes murine lactate dehydrogenase-elevating virus, simian hemorrhagic fever virus and equine arteritis virus. The arteriviruses share important pathogenesis properties, including macrophage tropism and the capacity to cause both severe disease and persistent infection. Accordingly, arteriviruses, and in particular murine lactate dehydrogenase-elevating virus, simian hemorrhagic fever virus and equine arteritis virus, may be targeted, for example through porcine CD163 or homologues thereof in other species, and murine, simian and equine models and knockout also provided.

[0784] Indeed, this approach may be extended to viruses or bacteria that cause other livestock diseases that may be transmitted to humans, such as Swine Influenza Virus (SIV) strains which include influenza C and the subtypes of influenza A known as H1N1, H1N2, H2N1, H3N1, H3N2, and H2N3, as well as pneumonia, meningitis and oedema mentioned above.

[0785] In some embodiments, the AD-functionalized CRISPR system described herein can be used to genetically modify a pig genome to inactivate one or more porcine endogenous retrovirus (PERVs) loci to facilitate clinical application of porcine-to-human xenotransplantation. See Yang et al., Science 350(6264):1101-1104 (2015), which is incorporated herein by reference in its entirey. In some embodiments, the AD-functionalized CRISPR system described herein can be used to produce a genetically modified pig that does not comprise any active porcine endogenous retrovirus (PERVs) locus.

### Application in Non-Animal Organisms

[0786] The AD-functionalized CRISPR system(s) (e.g., single or multiplexed) can be used in conjunction with recent advances in crop genomics. The systems described herein can be used to perform efficient and cost effective plant gene or genome interrogation or editing or manipulation—for instance, for rapid investigation and/or selection and/or interrogations and/or comparison and/or manipulations and/or transformation of plant genes or genomes; e.g., to create, identify, develop, optimize, or confer trait(s) or characteristic(s) to plant(s) or to transform a plant genome. There can accordingly be improved production of plants, new plants with new combinations of traits or characteristics or new plants with enhanced traits. The AD-functionalized CRISPR system can be used with regard to plants in Site-Directed Integration (SDI) or Gene Editing (GE) or any Near Reverse Breeding (NRB) or Reverse Breeding (RB) techniques. Aspects of utilizing the herein described Cas13 effector protein systems may be analogous to the use of the CRISPR-Cas (e.g. CRISPR-Cas9) system in plants, and mention is made of the University of Arizona website “CRISPR-PLANT” (http://www.genome.arizona.edu/crispr/) (supported by Penn State and AGI). Emodiments of the invention can be used in genome editing in plants or where RNAi or similar genome editing techniques have been used previously; see, e.g., Nekrasov, “Plant genome editing made easy: targeted mutagenesis in model and crop plants using the CRISPR-Cas system,” Plant Methods 2013, 9:39 (doi:10.1186/1746-4811-9-39); Brooks, “Efficient gene editing in tomato in the first generation using the CRISPR-Cas9 system,” Plant Physiology September 2014 pp 114.247577; Shan, “Targeted genome modification of crop plants using a CRISPR-Cas system,” Nature Biotechnology 31, 686-688 (2013); Feng, “Efficient genome editing in plants using a CRISPR-Cas system,” Cell Research (2013) 23:1229-1232. doi:10.1038/cr.2013.114; published online 20 Aug. 2013; Xie, “RNA-guided genome editing in plants using a CRISPR-Cas system,” Mol Plant. 2013 November; 6(6):1975-83. doi: 10.1093/mp/sst119. Epub 2013 Aug. 17; Xu, “Gene targeting using the Agrobacterium tumefaciens-mediated CRISPR-Cas system in rice,” Rice 2014, 7:5 (2014), Zhou et al., “Exploiting SNPs for biallelic CRISPR mutations in the outcrossing woody perennial Populus reveals 4-coumarate: CoA ligase specificity and Redundancy,” New Phytologist (2015) (Forum) 1-4 (available online only at www.newphytologist.com); Caliando et al, “Targeted DNA degradation using a CRISPR device stably carried in the host genome, NATURE COMMUNICATIONS 6:6989, DOI: 10.1038/ncomms7989, www.nature.com/naturecommunications DOI: 10.1038/ncomms7989; U.S. Pat. No. 6,603,061—Agrobacterium-Mediated Plant Transformation Method; U.S. Pat. No. 7,868,149—Plant Genome Sequences and Uses Thereof and US 2009/0100536—Transgenic Plants with Enhanced Agronomic Traits, all the contents and disclosure of each of which are herein incorporated by reference in their entirety. In the practice of the invention, the contents and disclosure of Morrell et al “Crop genomics: advances and applications,” Nat Rev Genet. 2011 Dec. 29; 13(2):85-96; each of which is incorporated by reference herein including as to how herein embodiments may be used as to plants. Accordingly, reference herein to animal cells may also apply, mutatis mutandis, to plant cells unless otherwise apparent; and, the enzymes herein having reduced off-target effects and systems employing such enzymes can be used in plant applications, including those mentioned herein.

### Application of AD-Functionalized CRISPR System to Plants and Yeast

[0787] In general, the term “plant” relates to any various photosynthetic, eukaryotic, unicellular or multicellular organism of the kingdom Plantae characteristically growing by cell division, containing chloroplasts, and having cell walls comprised of cellulose. The term plant encompasses monocotyledonous and dicotyledonous plants. Specifically, the plants are intended to comprise without limitation angiosperm and gymnosperm plants such as acacia, alfalfa, amaranth, apple, apricot, artichoke, ash tree, asparagus, avocado, banana, barley, beans, beet, birch, beech, blackberry, blueberry, broccoli, Brussel's sprouts, cabbage, canola, cantaloupe, carrot, cassava, cauliflower, cedar, a cereal, celery, chestnut, cherry, Chinese cabbage, citrus, clementine, clover, coffee, corn, cotton, cowpea, cucumber, cypress, eggplant, elm, endive, eucalyptus, fennel, figs, fir, geranium, grape, grapefruit, groundnuts, ground cherry, gum hemlock, hickory, kale, kiwifruit, kohlrabi, larch, lettuce, leek, lemon, lime, locust, pine, maidenhair, maize, mango, maple, melon, millet, mushroom, mustard, nuts, oak, oats, oil palm, okra, onion, orange, an ornamental plant or flower or tree, papaya, palm, parsley, parsnip, pea, peach, peanut, pear, peat, pepper, persimmon, pigeon pea, pine, pineapple, plantain, plum, pomegranate, potato, pumpkin, radicchio, radish, rapeseed, raspberry, rice, rye, sorghum, safflower, sallow, soybean, spinach, spruce, squash, strawberry, sugar beet, sugarcane, sunflower, sweet potato, sweet corn, tangerine, tea, tobacco, tomato, trees, triticale, turf grasses, turnips, vine, walnut, watercress, watermelon, wheat, yams, yew, and zucchini. The term plant also encompasses Algae, which are mainly photoautotrophs unified primarily by their lack of roots, leaves and other organs that characterize higher plants.

[0788] The methods for genome editing using the AD-functionalized CRISPR system as described herein can be used to confer desired traits on essentially any plant. A wide variety of plants and plant cell systems may be engineered for the desired physiological and agronomic characteristics described herein using the nucleic acid constructs of the present disclosure and the various transformation methods mentioned above. In preferred embodiments, target plants and plant cells for engineering include, but are not limited to, those monocotyledonous and dicotyledonous plants, such as crops including grain crops (e.g., wheat, maize, rice, millet, barley), fruit crops (e.g., tomato, apple, pear, strawberry, orange), forage crops (e.g., alfalfa), root vegetable crops (e.g., carrot, potato, sugar beets, yam), leafy vegetable crops (e.g., lettuce, spinach); flowering plants (e.g., petunia, rose, chrysanthemum), conifers and pine trees (e.g., pine fir, spruce); plants used in phytoremediation (e.g., heavy metal accumulating plants); oil crops (e.g., sunflower, rape seed) and plants used for experimental purposes (e.g., Arabidopsis). Thus, the methods and systems can be used over a broad range of plants, such as for example with dicotyledonous plants belonging to the orders Magniolales, Illiciales, Laurales, Piperales, Aristochiales, Nymphaeales, Ranunculales, Papeverales, Sarraceniaceae, Trochodendrales, Hamamelidales, Eucomiales, Leitneriales, Myricales, Fagales, Casuarinales, Caryophyllales, Batales, Polygonales, Plumbaginales, Dilleniales, Theales, Malvales, Urticales, Lecythidales, Violales, Salicales, Capparales, Ericales, Diapensales, Ebenales, Primulales, Rosales, Fabales, Podostemales, Haloragales, Myrtales, Cornales, Proteales, San tales, Rafflesiales, Celastrales, Euphorbiales, Rhamnales, Sapindales, Juglandales, Geraniales, Polygalales, Umbellales, Gentianales, Polemoniales, Lamiales, Plantaginales, Scrophulariales, Campanulales, Rubiales, Dipsacales, and Asterales; the methods and CRISPR-Cas systems can be used with monocotyledonous plants such as those belonging to the orders Alismatales, Hydrocharitales, Najadales, Triuridales, Commelinales, Eriocaulales, Restionales, Poales, Juncales, Cyperales, Typhales, Bromeliales, Zingiberales, Arecales, Cyclanthales, Pandanales, Arales, Lilliales, and Orchid ales, or with plants belonging to Gymnospermae, e.g those belonging to the orders Pinales, Ginkgoales, Cycadales, Araucariales, Cupressales and Gnetales.

[0789] The AD-functionalized CRISPR systems and methods of use described herein can be used over a broad range of plant species, included in the non-limitative list of dicot, monocot or gymnosperm genera hereunder: Atropa, Alseodaphne, Anacardium, Arachis, Beilschmiedia, Brassica, Carthamus, Cocculus, Croton, Cucumis, Citrus, Citrullus, Capsicum, Catharanthus, Cocos, Coffea, Cucurbita, Daucus, Duguetia, Eschscholzia, Ficus, Fragaria, Glaucium, Glycine, Gossypium, Helianthus, Hevea, Hyoscyamus, Lactuca, Landolphia, Linum, Litsea, Lycopersicon, Lupinus, Manihot, Majorana, Malus, Medicago, Nicotiana, Olea, Parthenium, Papaver, Persea, Phaseolus, Pistacia, Pisum, Pyrus, Prunus, Raphanus, Ricinus, Senecio, Sinomenium, Stephania, Sinapis, Solanum, Theobroma, Trifolium, Trigonella, Vicia, Vinca, Vilis, and Vigna; and the genera Allium, Andropogon, Aragrostis, Asparagus, Avena, Cynodon, Elaeis, Festuca, Festulolium, Heterocallis, Hordeum, Lemna, Lolium, Musa, Oryza, Panicum, Pannesetum, Phleum, Poa, Secale, Sorghum, Triticum, Zea, Abies, Cunninghamia, Ephedra, Picea, Pinus, and Pseudotsuga.

[0790] The AD-functionalized CRISPR systems and methods of use can also be used over a broad range of “algae” or “algae cells”; including for example algea selected from several eukaryotic phyla, including the Rhodophyta (red algae), Chlorophyta (green algae), Phaeophyta (brown algae), Bacillariophyta (diatoms), Eustigmatophyta and dinoflagellates as well as the prokaryotic phylum Cyanobacteria (blue-green algae). The term “algae” includes for example algae selected from: Amphora, Anabaena, Anikstrodesmis, Botryococcus, Chaetoceros, Chlamydomonas, Chlorella, Chlorococcum, Cyclotella, Cylindrotheca, Dunaliella, Emiliana, Euglena, Hematococcus, Isochrysis, Monochrysis, Monoraphidium, Nannochloris, Nannnochloropsis, Navicula, Nephrochloris, Nephroselmis, Nitzschia, Nodularia, Nostoc, Oochromonas, Oocystis, Oscillartoria, Pavlova, Phaeodactylum, Playtmonas, Pleurochrysis, Porhyra, Pseudoanabaena, Pyramimonas, Stichococcus, Synechococcus, Synechocystis, Tetraselmis, Thalassiosira, and Trichodesmium.

[0791] A part of a plant, i.e., a “plant tissue” may be treated according to the methods of the present invention to produce an improved plant. Plant tissue also encompasses plant cells. The term “plant cell” as used herein refers to individual units of a living plant, either in an intact whole plant or in an isolated form grown in in vitro tissue cultures, on media or agar, in suspension in a growth media or buffer or as a part of higher organized unites, such as, for example, plant tissue, a plant organ, or a whole plant.

[0792] A “protoplast” refers to a plant cell that has had its protective cell wall completely or partially removed using, for example, mechanical or enzymatic means resulting in an intact biochemical competent unit of living plant that can reform their cell wall, proliferate and regenerate grow into a whole plant under proper growing conditions.

[0793] The term “transformation” broadly refers to the process by which a plant host is genetically modified by the introduction of DNA by means of Agrobacteria or one of a variety of chemical or physical methods. As used herein, the term “plant host” refers to plants, including any cells, tissues, organs, or progeny of the plants. Many suitable plant tissues or plant cells can be transformed and include, but are not limited to, protoplasts, somatic embryos, pollen, leaves, seedlings, stems, calli, stolons, microtubers, and shoots. A plant tissue also refers to any clone of such a plant, seed, progeny, propagule whether generated sexually or asexually, and descendents of any of these, such as cuttings or seed.

[0794] The term “transformed” as used herein, refers to a cell, tissue, organ, or organism into which a foreign DNA molecule, such as a construct, has been introduced. The introduced DNA molecule may be integrated into the genomic DNA of the recipient cell, tissue, organ, or organism such that the introduced DNA molecule is transmitted to the subsequent progeny. In these embodiments, the “transformed” or “transgenic” cell or plant may also include progeny of the cell or plant and progeny produced from a breeding program employing such a transformed plant as a parent in a cross and exhibiting an altered phenotype resulting from the presence of the introduced DNA molecule. Preferably, the transgenic plant is fertile and capable of transmitting the introduced DNA to progeny through sexual reproduction.

[0795] The term “progeny”, such as the progeny of a transgenic plant, is one that is born of, begotten by, or derived from a plant or the transgenic plant. The introduced DNA molecule may also be transiently introduced into the recipient cell such that the introduced DNA molecule is not inherited by subsequent progeny and thus not considered “transgenic”. Accordingly, as used herein, a “non-transgenic” plant or plant cell is a plant which does not contain a foreign DNA stably integrated into its genome.

[0796] The term “plant promoter” as used herein is a promoter capable of initiating transcription in plant cells, whether or not its origin is a plant cell. Exemplary suitable plant promoters include, but are not limited to, those that are obtained from plants, plant viruses, and bacteria such as Agrobacterium or Rhizobium which comprise genes expressed in plant cells.

[0797] As used herein, a “fungal cell” refers to any type of eukaryotic cell within the kingdom of fungi. Phyla within the kingdom of fungi include Ascomycota, Basidiomycota, Blastocladiomycota, Chytridiomycota, Glomeromycota, Microsporidia, and Neocallimastigomycota. Fungal cells may include yeasts, molds, and filamentous fungi. In some embodiments, the fungal cell is a yeast cell.

[0798] As used herein, the term “yeast cell” refers to any fungal cell within the phyla Ascomycota and Basidiomycota. Yeast cells may include budding yeast cells, fission yeast cells, and mold cells. Without being limited to these organisms, many types of yeast used in laboratory and industrial settings are part of the phylum Ascomycota. In some embodiments, the yeast cell is an S. cerervisiae, Kluyveromyces marxianus, or Issatchenkia orientalis cell. Other yeast cells may include without limitation Candida spp. (e.g., Candida albicans), Yarrowia spp. (e.g., Yarrowia lipolytica), Pichia spp. (e.g., Pichia pastoris), Kluyveromyces spp. (e.g., Kluyveromyces lactis and Kluyveromyces marxianus), Neurospora spp. (e.g., Neurospora crassa), Fusarium spp. (e.g., Fusarium oxysporum), and Issatchenkia spp. (e.g., Issatchenkia orientalis, a.k.a. Pichia kudriavzevii and Candida acidothermophilum). In some embodiments, the fungal cell is a filamentous fungal cell. As used herein, the term “filamentous fungal cell” refers to any type of fungal cell that grows in filaments, i.e., hyphae or mycelia. Examples of filamentous fungal cells may include without limitation Aspergillus spp. (e.g., Aspergillus niger), Trichoderma spp. (e.g., Trichoderma reesei), Rhizopus spp. (e.g., Rhizopus oryzae), and Mortierella spp. (e.g., Mortierella isabellina).

[0799] In some embodiments, the fungal cell is an industrial strain. As used herein, “industrial strain” refers to any strain of fungal cell used in or isolated from an industrial process, e.g., production of a product on a commercial or industrial scale. Industrial strain may refer to a fungal species that is typically used in an industrial process, or it may refer to an isolate of a fungal species that may be also used for non-industrial purposes (e.g., laboratory research). Examples of industrial processes may include fermentation (e.g., in production of food or beverage products), distillation, biofuel production, production of a compound, and production of a polypeptide. Examples of industrial strains may include, without limitation, JAY270 and ATCC4124.

[0800] In some embodiments, the fungal cell is a polyploid cell. As used herein, a “polyploid” cell may refer to any cell whose genome is present in more than one copy. A polyploid cell may refer to a type of cell that is naturally found in a polyploid state, or it may refer to a cell that has been induced to exist in a polyploid state (e.g., through specific regulation, alteration, inactivation, activation, or modification of meiosis, cytokinesis, or DNA replication). A polyploid cell may refer to a cell whose entire genome is polyploid, or it may refer to a cell that is polyploid in a particular genomic locus of interest. Without wishing to be bound to theory, it is thought that the abundance of guideRNA may more often be a rate-limiting component in genome engineering of polyploid cells than in haploid cells, and thus the methods using the AD-functionalized CRISPR system described herein may take advantage of using a certain fungal cell type.

[0801] In some embodiments, the fungal cell is a diploid cell. As used herein, a “diploid” cell may refer to any cell whose genome is present in two copies. A diploid cell may refer to a type of cell that is naturally found in a diploid state, or it may refer to a cell that has been induced to exist in a diploid state (e.g., through specific regulation, alteration, inactivation, activation, or modification of meiosis, cytokinesis, or DNA replication). For example, the S. cerevisiae strain S228C may be maintained in a haploid or diploid state. A diploid cell may refer to a cell whose entire genome is diploid, or it may refer to a cell that is diploid in a particular genomic locus of interest. In some embodiments, the fungal cell is a haploid cell. As used herein, a “haploid” cell may refer to any cell whose genome is present in one copy. A haploid cell may refer to a type of cell that is naturally found in a haploid state, or it may refer to a cell that has been induced to exist in a haploid state (e.g., through specific regulation, alteration, inactivation, activation, or modification of meiosis, cytokinesis, or DNA replication). For example, the S. cerevisiae strain S228C may be maintained in a haploid or diploid state. A haploid cell may refer to a cell whose entire genome is haploid, or it may refer to a cell that is haploid in a particular genomic locus of interest.

[0802] As used herein, a “yeast expression vector” refers to a nucleic acid that contains one or more sequences encoding an RNA and/or polypeptide and may further contain any desired elements that control the expression of the nucleic acid(s), as well as any elements that enable the replication and maintenance of the expression vector inside the yeast cell. Many suitable yeast expression vectors and features thereof are known in the art; for example, various vectors and techniques are illustrated in in Yeast Protocols, 2nd edition, Xiao, W., ed. (Humana Press, New York, 2007) and Buckholz, R. G. and Gleeson, M. A. (1991) Biotechnology (NY) 9(11): 1067-72. Yeast vectors may contain, without limitation, a centromeric (CEN) sequence, an autonomous replication sequence (ARS), a promoter, such as an RNA Polymerase III promoter, operably linked to a sequence or gene of interest, a terminator such as an RNA polymerase III terminator, an origin of replication, and a marker gene (e.g., auxotrophic, antibiotic, or other selectable markers). Examples of expression vectors for use in yeast may include plasmids, yeast artificial chromosomes, 2 plasmids, yeast integrative plasmids, yeast replicative plasmids, shuttle vectors, and episomal plasmids.

### Stable Integration of AD-Functionalized CRISPR System Components in the Genome of Plants and Plant Cells

[0803] In particular embodiments, it is envisaged that the polynucleotides encoding the components of the AD-functionalized CRISPR system are introduced for stable integration into the genome of a plant cell. In these embodiments, the design of the transformation vector or the expression system can be adjusted depending on for when, where and under what conditions the guide RNA and/or fusion protein of nucleotide deaminase and Cas13 are expressed.

[0804] In particular embodiments, it is envisaged to introduce the components of the AD-functionalized CRISPR system stably into the genomic DNA of a plant cell. Additionally or alternatively, it is envisaged to introduce the components of the AD-functionalized CRISPR system for stable integration into the DNA of a plant organelle such as, but not limited to a plastid, e mitochondrion or a chloroplast.

[0805] The expression system for stable integration into the genome of a plant cell may contain one or more of the following elements: a promoter element that can be used to express the RNA and/or fusion protein of nucleotide deaminase and Cas13 in a plant cell; a 5′ untranslated region to enhance expression; an intron element to further enhance expression in certain cells, such as monocot cells; a multiple-cloning site to provide convenient restriction sites for inserting the guide RNA and/or the fusion protein of nucleotide deaminase and Cas13 encoding sequences and other desired elements; and a 3′ untranslated region to provide for efficient termination of the expressed transcript.

[0806] The elements of the expression system may be on one or more expression constructs which are either circular such as a plasmid or transformation vector, or non-circular such as linear double stranded DNA.

[0807] In a particular embodiment, an AD-functionalized CRISPR expression system comprises at least: a nucleotide sequence encoding a guide RNA (gRNA) that hybridizes with a target sequence in a plant, and wherein the guide RNA comprises a guide sequence and a direct repeat sequence, and a nucleotide sequence encoding a fusion protein of nucleotide deaminase and Cas13, wherein components (a) or (b) are located on the same or on different constructs, and whereby the different nucleotide sequences can be under control of the same or a different regulatory element operable in a plant cell.

[0808] DNA construct(s) containing the components of the AD-functionalized CRISPR system, and, where applicable, template sequence may be introduced into the genome of a plant, plant part, or plant cell by a variety of conventional techniques. The process generally comprises the steps of selecting a suitable host cell or host tissue, introducing the construct(s) into the host cell or host tissue, and regenerating plant cells or plants therefrom.

[0809] In particular embodiments, the DNA construct may be introduced into the plant cell using techniques such as but not limited to electroporation, microinjection, aerosol beam injection of plant cell protoplasts, or the DNA constructs can be introduced directly to plant tissue using biolistic methods, such as DNA particle bombardment (see also Fu et al., Transgenic Res. 2000 February; 9(1):11-9). The basis of particle bombardment is the acceleration of particles coated with gene/s of interest toward cells, resulting in the penetration of the protoplasm by the particles and typically stable integration into the genome. (see e.g. Klein et al, Nature (1987), Klein et ah, Bio/Technology (1992), Casas et ah, Proc. Natl. Acad. Sci. USA (1993).).

[0810] In particular embodiments, the DNA constructs containing components of the AD-functionalized CRISPR system may be introduced into the plant by Agrobacterium-mediated transformation. The DNA constructs may be combined with suitable T-DNA flanking regions and introduced into a conventional Agrobacterium tumefaciens host vector. The foreign DNA can be incorporated into the genome of plants by infecting the plants or by incubating plant protoplasts with Agrobacterium bacteria, containing one or more Ti (tumor-inducing) plasmids. (see e.g. Fraley et al., (1985), Rogers et al., (1987) and U.S. Pat. No. 5,563,055).

### Plant Promoters

[0811] In order to ensure appropriate expression in a plant cell, the components of the AD-functionalized CRISPR system described herein are typically placed under control of a plant promoter, i.e. a promoter operable in plant cells. The use of different types of promoters is envisaged.

[0812] A constitutive plant promoter is a promoter that is able to express the open reading frame (ORF) that it controls in all or nearly all of the plant tissues during all or nearly all developmental stages of the plant (referred to as “constitutive expression”). One non-limiting example of a constitutive promoter is the cauliflower mosaic virus 35S promoter. “Regulated promoter” refers to promoters that direct gene expression not constitutively, but in a temporally- and/or spatially-regulated manner, and includes tissue-specific, tissue-preferred and inducible promoters. Different promoters may direct the expression of a gene in different tissues or cell types, or at different stages of development, or in response to different environmental conditions. In particular embodiments, one or more of the AD-functionalized CRISPR components are expressed under the control of a constitutive promoter, such as the cauliflower mosaic virus 35S promoter issue-preferred promoters can be utilized to target enhanced expression in certain cell types within a particular plant tissue, for instance vascular cells in leaves or roots or in specific cells of the seed. Examples of particular promoters for use in the AD-functionalized CRISPR system are found in Kawamata et al., (1997) Plant Cell Physiol 38:792-803; Yamamoto et al., (1997) Plant J 12:255-65; Hire et al, (1992) Plant Mol Biol 20:207-18, Kuster et al, (1995) Plant Mol Biol 29:759-72, and Capana et al., (1994) Plant Mol Biol 25:681-91.

[0813] Inducible promoters can be of interest to express one or more of the components of the AD-functionalized CRISPR system under limited circumstances to avoid non-specific activity of the deaminase. In particular embodiments, one or more elements of the AD-functionalized CRISPR system are expressed under control of an inducible promoter. Examples of promoters that are inducible and that allow for spatiotemporal control of gene editing or gene expression may use a form of energy. The form of energy may include but is not limited to sound energy, electromagnetic radiation, chemical energy and/or thermal energy. Examples of inducible systems include tetracycline inducible promoters (Tet-On or Tet-Off), small molecule two-hybrid transcription activations systems (FKBP, ABA, etc), or light inducible systems (Phytochrome, LOV domains, or cryptochrome)., such as a Light Inducible Transcriptional Effector (LITE) that direct changes in transcriptional activity in a sequence-specific manner. The components of a light inducible system may include a fusion protein of nucleotide deaminase and Cas13, a light-responsive cytochrome heterodimer (e.g. from Arabidopsis thaliana). Further examples of inducible DNA binding proteins and methods for their use are provided in U.S. 61/736,465 and U.S. 61/721,283, which is hereby incorporated by reference in its entirety.

[0814] In particular embodiments, transient or inducible expression can be achieved by using, for example, chemical-regulated promotors, i.e. whereby the application of an exogenous chemical induces gene expression. Modulating of gene expression can also be obtained by a chemical-repressible promoter, where application of the chemical represses gene expression. Chemical-inducible promoters include, but are not limited to, the maize ln2-2 promoter, activated by benzene sulfonamide herbicide safeners (De Veylder et al., (1997) Plant Cell Physiol 38:568-77), the maize GST promoter (GST-11-27, WO93/01294), activated by hydrophobic electrophilic compounds used as pre-emergent herbicides, and the tobacco PR-1 a promoter (Ono et al., (2004) Biosci Biotechnol Biochem 68:803-7) activated by salicylic acid. Promoters which are regulated by antibiotics, such as tetracycline-inducible and tetracycline-repressible promoters (Gatz et al., (1991) Mol Gen Genet 227:229-37; U.S. Pat. Nos. 5,814,618 and 5,789,156) can also be used herein.

Translocation to and/or Expression in Specific Plant Organelles

[0815] The expression system may comprise elements for translocation to and/or expression in a specific plant organelle.

[0816] Chloroplast Targeting

[0817] In particular embodiments, it is envisaged that the AD-functionalized CRISPR system is used to specifically modify chloroplast genes or to ensure expression in the chloroplast. For this purpose use is made of chloroplast transformation methods or compartimentalization of the AD-functionalized CRISPR components to the chloroplast. For instance, the introduction of genetic modifications in the plastid genome can reduce biosafety issues such as gene flow through pollen.

[0818] Methods of chloroplast transformation are known in the art and include Particle bombardment, PEG treatment, and microinjection. Additionally, methods involving the translocation of transformation cassettes from the nuclear genome to the pastid can be used as described in WO2010061186.

[0819] Alternatively, it is envisaged to target one or more of the AD-functionalized CRISPR components to the plant chloroplast. This is achieved by incorporating in the expression construct a sequence encoding a chloroplast transit peptide (CTP) or plastid transit peptide, operably linked to the 5′ region of the sequence encoding the fusion protein of nucleotide deaminase and Cas13. The CTP is removed in a processing step during translocation into the chloroplast. Chloroplast targeting of expressed proteins is well known to the skilled artisan (see for instance Protein Transport into Chloroplasts, 2010, Annual Review of Plant Biology, Vol. 61: 157-180). In such embodiments it is also desired to target the guide RNA to the plant chloroplast. Methods and constructs which can be used for translocating guide RNA into the chloroplast by means of a chloroplast localization sequence are described, for instance, in US 20040142476, incorporated herein by reference. Such variations of constructs can be incorporated into the expression systems of the invention to efficiently translocate the AD-functionalized CRISPR system components.

### Introduction of Polynucleotides Encoding the AD-Functionalized CRISPR System in Algae Cells.

[0820] Transgenic algae (or other plants such as rape) may be particularly useful in the production of vegetable oils or biofuels such as alcohols (especially methanol and ethanol) or other products. These may be engineered to express or overexpress high levels of oil or alcohols for use in the oil or biofuel industries.

[0821] U.S. Pat. No. 8,945,839 describes a method for engineering Micro-Algae (Chlamydomonas reinhardtii cells) species) using Cas9. Using similar tools, the methods of the AD-functionalized CRISPR system described herein can be applied on Chlamydomonas species and other algae. In particular embodiments, a CRISPR-Cas protein (e.g., Cas13), nucleotide deaminase (which may be fused to the CRISPR-Cas protein or an aptamer-binding adaptor protein), and guide RNA are introduced in algae expressed using a vector that expresses the fusion protein of nucleotide deaminase and Cas13 under the control of a constitutive promoter such as Hsp70A-Rbc S2 or Beta2-tubulin. Guide RNA is optionally delivered using a vector containing T7 promoter. Alternatively, Cas13 mRNA and in vitro transcribed guide RNA can be delivered to algal cells. Electroporation protocols are available to the skilled person such as the standard recommended protocol from the GeneArt Chlamydomonas Engineering kit.

### Introduction of AD-Functionalized CRISPR System Components in Yeast Cells

[0822] In particular embodiments, the invention relates to the use of the AD-functionalized CRISPR system for genome editing of yeast cells. Methods for transforming yeast cells which can be used to introduce polynucleotides encoding the AD-functionalized CRISPR system components are described in Kawai et al., 2010, Bioeng Bugs. 2010 November-December; 1(6): 395-403). Non-limiting examples include transformation of yeast cells by lithium acetate treatment (which may further include carrier DNA and PEG treatment), bombardment or by electroporation.

### Transient Expression of AD-Functionalized CRISPR System Components in Plants and Plant Cell

[0823] In particular embodiments, it is envisaged that the guide RNA and/or CRISPR-Cas gene are transiently expressed in the plant cell. In these embodiments, the AD-functionalized CRISPR system can ensure modification of a target gene only when both the guide RNA, the CRISPR-Cas protein (e.g., Cas13), and nucleotide deaminase (which may be fused to the CRISPR-Cas protein or an aptamer-binding adaptor protein), are present in a cell, such that genomic modification can further be controlled. As the expression of the CRISPR-Cas protein is transient, plants regenerated from such plant cells typically contain no foreign DNA. In particular embodiments the CRISPR-Cas protein is stably expressed by the plant cell and the guide sequence is transiently expressed.

[0824] In particular embodiments, the AD-functionalized CRISPR system components can be introduced in the plant cells using a plant viral vector (Scholthof et al. 1996, Annu Rev Phytopathol. 1996; 34:299-323). In further particular embodiments, said viral vector is a vector from a DNA virus. For example, geminivirus (e.g., cabbage leaf curl virus, bean yellow dwarf virus, wheat dwarf virus, tomato leaf curl virus, maize streak virus, tobacco leaf curl virus, or tomato golden mosaic virus) or nanovirus (e.g., Faba bean necrotic yellow virus). In other particular embodiments, said viral vector is a vector from an RNA virus. For example, tobravirus (e.g., tobacco rattle virus, tobacco mosaic virus), potexvirus (e.g., potato virus X), or hordeivirus (e.g., barley stripe mosaic virus). The replicating genomes of plant viruses are non-integrative vectors.

[0825] In particular embodiments, the vector used for transient expression of AD-functionalized CRISPR system is for instance a pEAQ vector, which is tailored for Agrobacterium-mediated transient expression (Sainsbury F. et al., Plant Biotechnol J. 2009 September; 7(7):682-93) in the protoplast. Precise targeting of genomic locations was demonstrated using a modified Cabbage Leaf Curl virus (CaLCuV) vector to express guide RNAs in stable transgenic plants expressing a CRISPR enzyme (Scientific Reports 5, Article number: 14926 (2015), doi:10.1038/srep14926).

[0826] In particular embodiments, double-stranded DNA fragments encoding the guide RNA and/or the CRISPR-Cas gene can be transiently introduced into the plant cell. In such embodiments, the introduced double-stranded DNA fragments are provided in sufficient quantity to modify the cell but do not persist after a contemplated period of time has passed or after one or more cell divisions. Methods for direct DNA transfer in plants are known by the skilled artisan (see for instance Davey et al. Plant Mol Biol. 1989 September; 13(3):273-85.)

[0827] In other embodiments, an RNA polynucleotide encoding the CRISPR-Cas protein (e.g., Cas13) and/or nucleotide deaminase (which may be fused to the CRISPR-Cas protein or an aptamer-binding adaptor protein) is introduced into the plant cell, which is then translated and processed by the host cell generating the protein in sufficient quantity to modify the cell (in the presence of at least one guide RNA) but which does not persist after a contemplated period of time has passed or after one or more cell divisions. Methods for introducing mRNA to plant protoplasts for transient expression are known by the skilled artisan (see for instance in Gallie, Plant Cell Reports (1993), 13; 119-122).

[0828] Combinations of the different methods described above are also envisaged.

### Delivery of AD-Functionalized CRISPR System Components to the Plant Cell

[0829] In particular embodiments, it is of interest to deliver one or more components of the AD-functionalized CRISPR system directly to the plant cell. This is of interest, inter alia, for the generation of non-transgenic plants (see below). In particular embodiments, one or more of the AD-functionalized CRISPR system components is prepared outside the plant or plant cell and delivered to the cell. For instance in particular embodiments, the CRISPR-Cas protein is prepared in vitro prior to introduction to the plant cell. The CRISPR-Cas protein can be prepared by various methods known by one of skill in the art and include recombinant production. After expression, the CRISPR-Cas protein is isolated, refolded if needed, purified and optionally treated to remove any purification tags, such as a His-tag. Once crude, partially purified, or more completely purified CRISPR-Cas protein is obtained, the protein may be introduced to the plant cell.

[0830] In particular embodiments, the CRISPR-Cas protein is mixed with guide RNA targeting the gene of interest to form a pre-assembled ribonucleoprotein.

[0831] The individual components or pre-assembled ribonucleoprotein can be introduced into the plant cell via electroporation, by bombardment with CRISPR-Cas-associated gene product coated particles, by chemical transfection or by some other means of transport across a cell membrane. For instance, transfection of a plant protoplast with a pre-assembled CRISPR ribonucleoprotein has been demonstrated to ensure targeted modification of the plant genome (as described by Woo et al. Nature Biotechnology, 2015; DOI: 10.1038/nbt.3389).

[0832] In particular embodiments, the AD-functionalized CRISPR system components are introduced into the plant cells using nanoparticles. The components, either as protein or nucleic acid or in a combination thereof, can be uploaded onto or packaged in nanoparticles and applied to the plants (such as for instance described in WO 2008042156 and US 20130185823). In particular, embodiments of the invention comprise nanoparticles uploaded with or packed with DNA molecule(s) encoding the CRISPR-Cas protein (e.g., Cas13), DNA molecule(s) encoding nucleotide deaminase (which may be fused to the CRISPR-Cas protein or an aptamer-binding adaptor protein), and DNA molecules encoding the guide RNA and/or isolated guide RNA as described in WO2015089419.

[0833] Further means of introducing one or more components of the AD-functionalized CRISPR system to the plant cell is by using cell penetrating peptides (CPP). Accordingly, in particular, embodiments the invention comprises compositions comprising a cell penetrating peptide linked to the CRISPR-Cas protein. In particular embodiments of the present invention, the CRISPR-Cas protein and/or guide RNA is coupled to one or more CPPs to effectively transport them inside plant protoplasts. Ramakrishna (Genome Res. 2014 June; 24(6):1020-7 for Cas9 in human cells). In other embodiments, the CRISPR-Cas gene and/or guide RNA are encoded by one or more circular or non-circular DNA molecule(s) which are coupled to one or more CPPs for plant protoplast delivery. The plant protoplasts are then regenerated to plant cells and further to plants. CPPs are generally described as short peptides of fewer than 35 amino acids either derived from proteins or from chimeric sequences which are capable of transporting biomolecules across cell membrane in a receptor independent manner. CPP can be cationic peptides, peptides having hydrophobic sequences, amphipatic peptides, peptides having proline-rich and anti-microbial sequence, and chimeric or bipartite peptides (Pooga and Langel 2005). CPPs are able to penetrate biological membranes and as such trigger the movement of various biomolecules across cell membranes into the cytoplasm and to improve their intracellular routing, and hence facilitate interaction of the biolomolecule with the target. Examples of CPP include amongst others: Tat, a nuclear transcriptional activator protein required for viral replication by HIV typel, penetratin, Kaposi fibroblast growth factor (FGF) signal peptide sequence, integrin 3 signal peptide sequence; polyarginine peptide Args sequence, Guanine rich-molecular transporters, sweet arrow peptide, etc.

### Use of the AD-Functionalized CRISPR System to Make Genetically Modified Non-Transgenic Plants

[0834] In particular embodiments, the methods described herein are used to modify endogenous genes or to modify their expression without the permanent introduction into the genome of the plant of any foreign gene, including those encoding CRISPR components, so as to avoid the presence of foreign DNA in the genome of the plant. This can be of interest as the regulatory requirements for non-transgenic plants are less rigorous.

[0835] In particular embodiments, this is ensured by transient expression of the AD-functionalized CRISPR system components. In particular embodiments one or more of the components are expressed on one or more viral vectors which produce sufficient CRISPR-Cas protein, nucleotide deaminase, and guide RNA to consistently steadily ensure modification of a gene of interest according to a method described herein.

[0836] In particular embodiments, transient expression of AD-functionalized CRISPR system constructs is ensured in plant protoplasts and thus not integrated into the genome. The limited window of expression can be sufficient to allow the AD-functionalized CRISPR system to ensure modification of a target gene as described herein.

[0837] In particular embodiments, the different components of the AD-functionalized CRISPR system are introduced in the plant cell, protoplast or plant tissue either separately or in mixture, with the aid of pariculate delivering molecules such as nanoparticles or CPP molecules as described herein above.

[0838] The expression of the AD-functionalized CRISPR system components can induce targeted modification of the genome, by deaminase activity of the nucleotide deaminase. The different strategies described herein above allow CRISPR-mediated targeted genome editing without requiring the introduction of the AD-functionalized CRISPR systemt components into the plant genome. Components which are transiently introduced into the plant cell are typically removed upon crossing.

### Plant Cultures and Regeneration

[0839] In particular embodiments, plant cells which have a modified genome and that are produced or obtained by any of the methods described herein, can be cultured to regenerate a whole plant which possesses the transformed or modified genotype and thus the desired phenotype. Conventional regeneration techniques are well known to those skilled in the art. Particular examples of such regeneration techniques rely on manipulation of certain phytohormones in a tissue culture growth medium, and typically relying on a biocide and/or herbicide marker which has been introduced together with the desired nucleotide sequences. In further particular embodiments, plant regeneration is obtained from cultured protoplasts, plant callus, explants, organs, pollens, embryos or parts thereof (see e.g. Evans et al. (1983), Handbook of Plant Cell Culture, Klee et al (1987) Ann. Rev. of Plant Phys.).

[0840] In particular embodiments, transformed or improved plants as described herein can be self-pollinated to provide seed for homozygous improved plants of the invention (homozygous for the DNA modification) or crossed with non-transgenic plants or different improved plants to provide seed for heterozygous plants. Where a recombinant DNA was introduced into the plant cell, the resulting plant of such a crossing is a plant which is heterozygous for the recombinant DNA molecule. Both such homozygous and heterozygous plants obtained by crossing from the improved plants and comprising the genetic modification (which can be a recombinant DNA) are referred to herein as “progeny”. Progeny plants are plants descended from the original transgenic plant and containing the genome modification or recombinant DNA molecule introduced by the methods provided herein. Alternatively, genetically modified plants can be obtained by one of the methods described supra using the AD-functionalized CRISPR system whereby no foreign DNA is incorporated into the genome. Progeny of such plants, obtained by further breeding may also contain the genetic modification. Breedings are performed by any breeding methods that are commonly used for different crops (e.g., Allard, Principles of Plant Breeding, John Wiley & Sons, NY, U. of CA, Davis, Calif., 50-98 (1960).

Generation of Plants with Enhanced Agronomic Traits

[0841] The AD-functionalized CRISPR systems provided herein can be used to introduce targeted A-G and T-C mutations. By co-expression of multiple targeting RNAs directed to achieve multiple modifications in a single cell, multiplexed genome modification can be ensured. This technology can be used to high-precision engineering of plants with improved characteristics, including enhanced nutritional quality, increased resistance to diseases and resistance to biotic and abiotic stress, and increased production of commercially valuable plant products or heterologous compounds.

[0842] In particular embodiments, the AD-functionalized CRISPR system as described herein is used to introduce targeted A-G and T-C mutations. Such mutation can be a nonsense mutation (e.g., premature stop codon) or a missense mutation (e.g., encoding different amino acid residue). This is of interest where the A-G and T-C mutations in certain endogenous genes can confer or contribute to a desired trait.

[0843] The methods described herein generally result in the generation of “improved plants” in that they have one or more desirable traits compared to the wildtype plant. In particular embodiments, the plants, plant cells or plant parts obtained are transgenic plants, comprising an exogenous DNA sequence incorporated into the genome of all or part of the cells of the plant. In particular embodiments, non-transgenic genetically modified plants, plant parts or cells are obtained, in that no exogenous DNA sequence is incorporated into the genome of any of the plant cells of the plant. In such embodiments, the improved plants are non-transgenic. Where only the modification of an endogenous gene is ensured and no foreign genes are introduced or maintained in the plant genome, the resulting genetically modified crops contain no foreign genes and can thus basically be considered non-transgenic.

[0844] In particular embodiments, the polynucleotides are delivered into the cell by a DNA virus (e.g., a geminivirus) or an RNA virus (e.g., a tobravirus). In particular embodiments, the introducing steps include delivering to the plant cell a T-DNA containing one or more polynucleotide sequences encoding the CRISPR-Cas protein, the nucleotide deaminase, and the guide RNA, where the delivering is via Agrobacterium. The polynucleotide sequence encoding the components of the AD-functionalized CRISPR system can be operably linked to a promoter, such as a constitutive promoter (e.g., a cauliflower mosaic virus 35S promoter), or a cell specific or inducible promoter. In particular embodiments, the polynucleotide is introduced by microprojectile bombardment. In particular embodiments, the method further includes screening the plant cell after the introducing steps to determine whether the expression of the gene of interest has been modified. In particular embodiments, the methods include the step of regenerating a plant from the plant cell. In further embodiments, the methods include cross breeding the plant to obtain a genetically desired plant lineage.

[0845] In particular embodiments of the methods described above, disease resistant crops are obtained by targeted mutation of disease susceptibility genes or genes encoding negative regulators (e.g. Mlo gene) of plant defense genes. In a particular embodiment, herbicide-tolerant crops are generated by targeted substitution of specific nucleotides in plant genes such as those encoding acetolactate synthase (ALS) and protoporphyrinogen oxidase (PPO). In particular embodiments drought and salt tolerant crops by targeted mutation of genes encoding negative regulators of abiotic stress tolerance, low amylose grains by targeted mutation of Waxy gene, rice or other grains with reduced rancidity by targeted mutation of major lipase genes in aleurone layer, etc. In particular embodiments. A more extensive list of endogenous genes encoding a traits of interest are listed below.

### Use of AD-Functionalized CRISPR System to Modify Polyploid Plants

[0846] Many plants are polyploid, which means they carry duplicate copies of their genomes-sometimes as many as six, as in wheat. The methods according to the present invention, which make use of the AD-functionalized CRISPR system can be “multiplexed” to affect all copies of a gene, or to target dozens of genes at once. For instance, in particular embodiments, the methods of the present invention are used to simultaneously ensure a loss of function mutation in different genes responsible for suppressing defences against a disease. In particular embodiments, the methods of the present invention are used to simultaneously suppress the expression of the TaMLO-Al, TaMLO-B1 and TaMLO-D1 nucleic acid sequence in a wheat plant cell and regenerating a wheat plant therefrom, in order to ensure that the wheat plant is resistant to powdery mildew (see also WO2015109752).

### Examplary Genes Conferring Agronomic Traits

[0847] In particular embodiments, the invention encompasses methods which involve targeted A-G and T-C mutations in endogenous genes and their regulatory elements, such as listed below:

[0848] 1. Genes that Confer Resistance to Pests or Diseases:

[0849] Plant disease resistance genes. A plant can be transformed with cloned resistance genes to engineer plants that are resistant to specific pathogen strains. See, e.g., Jones et al., Science 266:789 (1994) (cloning of the tomato Cf-9 gene for resistance to Cladosporium fulvum); Martin et al., Science 262:1432 (1993) (tomato Pto gene for resistance to Pseudomonas syringae pv. tomato encodes a protein kinase); Mindrinos et al., Cell 78:1089 (1994) (Arabidopsmay be RSP2 gene for resistance to Pseudomonas syringae). A plant gene that is upregulated or down regulated during pathogen infection can be engineered for pathogen resistance. See, e.g., Thomazella et al., bioRxiv 064824; doi: https://doi.org/10.1101/064824 Epub. Jul. 23, 2016 (tomato plants with deletions in the SlDMR6-1 which is normally upregulated during pathogen infection).

[0850] Genes conferring resistance to a pest, such as soybean cyst nematode. See e.g., PCT Application WO 96/30517; PCT Application WO 93/19181.

[0851] Bacillus thuringiensis proteins see, e.g., Geiser et al., Gene 48:109 (1986).

[0852] Lectins, see, for example, Van Damme et al., Plant Molec. Biol. 24:25 (1994.

[0853] Vitamin-binding protein, such as avidin, see PCT application US93/06487, teaching the use of avidin and avidin homologues as larvicides against insect pests.

[0854] Enzyme inhibitors such as protease or proteinase inhibitors or amylase inhibitors. See, e.g., Abe et al., J. Biol. Chem. 262:16793 (1987), Huub et al., Plant Molec. Biol. 21:985 (1993)), Sumitani et al., Biosci. Biotech. Biochem. 57:1243 (1993) and U.S. Pat. No. 5,494,813.

[0855] Insect-specific hormones or pheromones such as ecdysteroid or juvenile hormone, a variant thereof, a mimetic based thereon, or an antagonist or agonist thereof. See, for example Hammock et al., Nature 344:458 (1990).

[0856] Insect-specific peptides or neuropeptides which, upon expression, disrupts the physiology of the affected pest. For example Regan, J. Biol. Chem. 269:9 (1994) and Pratt et al., Biochem. Biophys. Res. Comm. 163:1243 (1989). See also U.S. Pat. No. 5,266,317.

[0857] Insect-specific venom produced in nature by a snake, a wasp, or any other organism. For example, see Pang et al., Gene 116: 165 (1992).

[0858] Enzymes responsible for a hyperaccumulation of a monoterpene, a sesquiterpene, a steroid, hydroxamic acid, a phenylpropanoid derivative or another nonprotein molecule with insecticidal activity.

[0859] Enzymes involved in the modification, including the post-translational modification, of a biologically active molecule; for example, a glycolytic enzyme, a proteolytic enzyme, a lipolytic enzyme, a nuclease, a cyclase, a transaminase, an esterase, a hydrolase, a phosphatase, a kinase, a phosphorylase, a polymerase, an elastase, a chitinase and a glucanase, whether natural or synthetic. See PCT application WO93/02197, Kramer et al., Insect Biochem. Molec. Biol. 23:691 (1993) and Kawalleck et al., Plant Molec. Biol. 21:673 (1993).

[0860] Molecules that stimulates signal transduction. For example, see Botella et al., Plant Molec. Biol. 24:757 (1994), and Griess et al., Plant Physiol. 104:1467 (1994).

[0861] Viral-invasive proteins or a complex toxin derived therefrom. See Beachy et al., Ann. rev. Phytopathol. 28:451 (1990).

[0862] Developmental-arrestive proteins produced in nature by a pathogen or a parasite. See Lamb et al., Bio/Technology 10:1436 (1992) and Toubart et al., Plant J. 2:367 (1992).

[0863] A developmental-arrestive protein produced in nature by a plant. For example, Logemann et al., Bio/Technology 10:305 (1992).

[0864] In plants, pathogens are often host-specific. For example, some Fusarium species will causes tomato wilt but attacks only tomato, and other Fusarium species attack only wheat. Plants have existing and induced defenses to resist most pathogens. Mutations and recombination events across plant generations lead to genetic variability that gives rise to susceptibility, especially as pathogens reproduce with more frequency than plants. In plants there can be non-host resistance, e.g., the host and pathogen are incompatible or there can be partial resistance against all races of a pathogen, typically controlled by many genes and/or also complete resistance to some races of a pathogen but not to other races. Such resistance is typically controlled by a few genes. Using methods and components of the AD-functionalized CRISPR system, a new tool now exists to induce specific mutations in anticipation hereon. Accordingly, one can analyze the genome of sources of resistance genes, and in plants having desired characteristics or traits, use the method and components of the AD-functionalized CRISPR system to induce the rise of resistance genes. The present systems can do so with more precision than previous mutagenic agents and hence accelerate and improve plant breeding programs.

[0865] 2. Genes Involved in Plant Diseases, Such as Those Listed in WO 2013046247:

[0866] Rice diseases: Magnaporthe grisea, Cochliobolus miyabeanus, Rhizoctonia solani, Gibberella fujikuroi; Wheat diseases: Erysiphe graminis, Fusarium graminearum, F. avenaceum, F. culmorum, Microdochium nivale, Puccinia striiformis, P. graminis, P. recondita, Micronectriella nivale, Typhula sp., Ustilago tritici, Tilletia caries, Pseudocercosporella herpotrichoides, Mycosphaerella graminicola, Stagonospora nodorum, Pyrenophora tritici-repentis; Barley diseases: Erysiphe graminis, Fusarium graminearum, F. avenaceum, F. culmorum, Microdochium nivale, Puccinia striiformis, P. graminis, P. hordei, Ustilago nuda, Rhynchosporium secalis, Pyrenophora teres, Cochliobolus sativus, Pyrenophora graminea, Rhizoctonia solani; Maize diseases: Ustilago maydis, Cochliobolus heterostrophus, Gloeocercospora sorghi, Puccinia polysora, Cercospora zeae-maydis, Rhizoctonia solani;

[0867] Citrus diseases: Diaporthe citri, Elsinoe fawcetti, Penicillium digitatum, P. italicum, Phytophthora parasitica, Phytophthora citrophthora; Apple diseases: Monilinia mali, Valsa ceratosperma, Podosphaera leucotricha, Alternaria alternata apple pathotype, Venturia inaequalis, Colletotrichum acutatum, Phytophtora cactorum;

[0868] Pear diseases: Venturia nashicola, V. pirina, Alternaria alternata Japanese pear pathotype, Gymnosporangium haraeanum, Phytophtora cactorum;

[0869] Peach diseases: Monilinia fructicola, Cladosporium carpophilum, Phomopsis sp.;

[0870] Grape diseases: Elsinoe ampelina, Glomerella cingulata, Uninula necator, Phakopsora ampelopsidis, Guignardia bidwellii, Plasmopara viticola;

[0871] Persimmon diseases: Gloesporium kaki, Cercospora kaki, Mycosphaerela nawae;

[0872] Gourd diseases: Colletotrichum lagenarium, Sphaerotheca fuliginea, Mycosphaerella melonis, Fusarium oxysporum, Pseudoperonospora cubensis, Phytophthora sp., Pythium sp.;

[0873] Tomato diseases: Alternaria solani, Cladosporium fulvum, Phytophthora infestans; Pseudomonas syringae pv. Tomato; Phytophthora capsici; Xanthomonas

[0874] Eggplant diseases: Phomopsis vexans, Erysiphe cichoracearum; Brassicaceous vegetable diseases: Alternaria japonica, Cercosporella brassicae, Plasmodiophora brassicae, Peronospora parasitica;

[0875] Welsh onion diseases: Puccinia allii, Peronospora destructor;

[0876] Soybean diseases: Cercospora kikuchii, Elsinoe glycines, Diaporthe phaseolorum var. sojae, Septoria glycines, Cercospora sojina, Phakopsora pachyrhizi, Phytophthora sojae, Rhizoctonia solani, Corynespora casiicola, Sclerotinia sclerotiorum;

[0877] Kidney bean diseases: Colletrichum lindemthianum;

[0878] Peanut diseases: Cercospora personata, Cercospora arachidicola, Sclerotium rolfsii;

[0879] Pea diseases pea: Erysiphe pisi;

[0880] Potato diseases: Alternaria solani, Phytophthora infestans, Phytophthora erythroseptica, Spongospora subterranean, f. sp. Subterranean;

[0881] Strawberry diseases: Sphaerotheca humuli, Glomerella cingulata;

[0882] Tea diseases: Exobasidium reticulatum, Elsinoe leucospila, Pestalotiopsis sp., Colletotrichum theae-sinensis;

[0883] Tobacco diseases: Alternaria longipes, Erysiphe cichoracearum, Colletotrichum tabacum, Peronospora tabacina, Phytophthora nicotianae;

[0884] Rapeseed diseases: Sclerotinia sclerotiorum, Rhizoctonia solani;

[0885] Cotton diseases: Rhizoctonia solani;

[0886] Beet diseases: Cercospora beticola, Thanatephorus cucumeris, Thanatephorus cucumeris, Aphanomyces cochlioides;

[0887] Rose diseases: Diplocarpon rosae, Sphaerotheca pannosa, Peronospora sparsa;

[0888] Diseases of chrysanthemum and asteraceae: Bremia lactuca, Septoria chrysanthemi-indici, Puccinia horiana;

[0889] Diseases of various plants: Pythium aphanidermatum, Pythium debarianum, Pythium graminicola, Pythium irregulare, Pythium ultimum, Botrytis cinerea, Sclerotinia sclerotiorum;

[0890] Radish diseases: Alternaria brassicicola;

[0891] Zoysia diseases: Sclerotinia homeocarpa, Rhizoctonia solani;

[0892] Banana diseases: Mycosphaerella fijiensis, Mycosphaerella musicola;

[0893] Sunflower diseases: Plasmopara halstedii;

[0894] Seed diseases or diseases in the initial stage of growth of various plants caused by Aspergillus spp., Penicillium spp., Fusarium spp., Gibberella spp., Tricoderma spp., Thielaviopsis spp., Rhizopus spp., Mucor spp., Corticium spp., Rhoma spp., Rhizoctonia spp., Diplodia spp., or the like;

[0895] Virus diseases of various plants mediated by Polymixa spp., Olpidium spp., or the like.

[0896] 3. Examples of Genes that Confer Resistance to Herbicides:

[0897] Resistance to herbicides that inhibit the growing point or meristem, such as an imidazolinone or a sulfonylurea, for example, by Lee et al., EMBO J. 7:1241 (1988), and Miki et al., Theor. Appl. Genet. 80:449 (1990), respectively.

[0898] Glyphosate tolerance (resistance conferred by, e.g., mutant 5-enolpyruvylshikimate-3-phosphate synthase (EPSPs) genes, aroA genes and glyphosate acetyl transferase (GAT) genes, respectively), or resistance to other phosphono compounds such as by glufosinate (phosphinothricin acetyl transferase (PAT) genes from Streptomyces species, including Streptomyces hygroscopicus and Streptomyces viridichromogenes), and to pyridinoxy or phenoxy proprionic acids and cyclohexones by ACCase inhibitor-encoding genes. See, for example, U.S. Pat. Nos. 4,940,835 and 6,248,876, U.S. Pat. No. 4,769,061, EP No. 0 333 033 and U.S. Pat. No. 4,975,374. See also EP No. 0242246, DeGreef et al., Bio/Technology 7:61 (1989), Marshall et al., Theor. Appl. Genet. 83:435 (1992), WO 2005012515 to Castle et. al. and WO 2005107437.

[0899] Resistance to herbicides that inhibit photosynthesis, such as a triazine (psbA and gs+ genes) or a benzonitrile (nitrilase gene), and glutathione S-transferase in Przibila et al., Plant Cell 3:169 (1991), U.S. Pat. No. 4,810,648, and Hayes et al., Biochem. J. 285: 173 (1992).

[0900] Genes encoding Enzymes detoxifying the herbicide or a mutant glutamine synthase enzyme that is resistant to inhibition, e.g. n U.S. patent application Ser. No. 11/760,602. Or a detoxifying enzyme is an enzyme encoding a phosphinothricin acetyltransferase (such as the bar or pat protein from Streptomyces species). Phosphinothricin acetyltransferases are for example described in U.S. Pat. Nos. 5,561,236; 5,648,477; 5,646,024; 5,273,894; 5,637,489; 5,276,268; 5,739,082; 5,908,810 and 7,112,665.

[0901] Hydroxyphenylpyruvatedioxygenases (HPPD) inhibitors, naturally occuring HPPD resistant enzymes, or genes encoding a mutated or chimeric HPPD enzyme as described in WO 96/38567, WO 99/24585, and WO 99/24586, WO 2009/144079, WO 2002/046387, or U.S. Pat. No. 6,768,044.

[0902] 4. Examples of Genes Involved in Abiotic Stress Tolerance:

[0903] Transgene capable of reducing the expression and/or the activity of poly(ADP-ribose) polymerase (PARP) gene in the plant cells or plants as described in WO 00/04173 or, WO/2006/045633.

[0904] Transgenes capable of reducing the expression and/or the activity of the PARG encoding genes of the plants or plants cells, as described e.g. in WO 2004/090140.

[0905] Transgenes coding for a plant-functional enzyme of the nicotineamide adenine dinucleotide salvage synthesis pathway including nicotinamidase, nicotinate phosphoribosyltransferase, nicotinic acid mononucleotide adenyl transferase, nicotinamide adenine dinucleotide synthetase or nicotine amide phosphorybosyltransferase as described e.g. in EP 04077624.7, WO 2006/133827, PCT/EP07/002,433, EP 1999263, or WO 2007/107326.

[0906] Enzymes involved in carbohydrate biosynthesis include those described in e.g. EP 0571427, WO 95/04826, EP 0719338, WO 96/15248, WO 96/19581, WO 96/27674, WO 97/11188, WO 97/26362, WO 97/32985, WO 97/42328, WO 97/44472, WO 97/45545, WO 98/27212, WO 98/40503, WO99/58688, WO 99/58690, WO 99/58654, WO 00/08184, WO 00/08185, WO 00/08175, WO 00/28052, WO 00/77229, WO 01/12782, WO 01/12826, WO 02/101059, WO 03/071860, WO 2004/056999, WO 2005/030942, WO 2005/030941, WO 2005/095632, WO 2005/095617, WO 2005/095619, WO 2005/095618, WO 2005/123927, WO 2006/018319, WO 2006/103107, WO 2006/108702, WO 2007/009823, WO 00/22140, WO 2006/063862, WO 2006/072603, WO 02/034923, EP 06090134.5, EP 06090228.5, EP 06090227.7, EP 07090007.1, EP 07090009.7, WO 01/14569, WO 02/79410, WO 03/33540, WO 2004/078983, WO 01/19975, WO 95/26407, WO 96/34968, WO 98/20145, WO 99/12950, WO 99/66050, WO 99/53072, U.S. Pat. No. 6,734,341, WO 00/11192, WO 98/22604, WO 98/32326, WO 01/98509, WO 01/98509, WO 2005/002359, U.S. Pat. Nos. 5,824,790, 6,013,861, WO 94/04693, WO 94/09144, WO 94/11520, WO 95/35026 or WO 97/20936 or enzymes involved in the production of polyfructose, especially of the inulin and levan-type, as disclosed in EP 0663956, WO 96/01904, WO 96/21023, WO 98/39460, and WO 99/24593, the production of alpha-1,4-glucans as disclosed in WO 95/31553, US 2002031826, U.S. Pat. Nos. 6,284,479, 5,712,107, WO 97/47806, WO 97/47807, WO 97/47808 and WO 00/14249, the production of alpha-1,6 branched alpha-1,4-glucans, as disclosed in WO 00/73422, the production of alternan, as disclosed in e.g. WO 00/47727, WO 00/73422, EP 06077301.7, U.S. Pat. No. 5,908,975 and EP 0728213, the production of hyaluronan, as for example disclosed in WO 2006/032538, WO 2007/039314, WO 2007/039315, WO 2007/039316, JP 2006304779, and WO 2005/012529.

[0907] Genes that improve drought resistance. For example, WO 2013122472 discloses that the absence or reduced level of functional Ubiquitin Protein Ligase protein (UPL) protein, more specifically, UPL3, leads to a decreased need for water or improved resistance to drought of said plant. Other examples of transgenic plants with increased drought tolerance are disclosed in, for example, US 2009/0144850, US 2007/0266453, and WO 2002/083911. US2009/0144850 describes a plant displaying a drought tolerance phenotype due to altered expression of a DR02 nucleic acid. US 2007/0266453 describes a plant displaying a drought tolerance phenotype due to altered expression of a DR03 nucleic acid and WO 2002/08391 1 describes a plant having an increased tolerance to drought stress due to a reduced activity of an ABC transporter which is expressed in guard cells. Another example is the work by Kasuga and co-authors (1999), who describe that overexpression of cDNA encoding DREB1 A in transgenic plants activated the expression of many stress tolerance genes under normal growing conditions and resulted in improved tolerance to drought, salt loading, and freezing. However, the expression of DREBlA also resulted in severe growth retardation under normal growing conditions (Kasuga (1999) Nat Biotechnol 17(3) 287-291).

[0908] In further particular embodiments, crop plants can be improved by influencing specific plant traits. For example, by developing pesticide-resistant plants, improving disease resistance in plants, improving plant insect and nematode resistance, improving plant resistance against parasitic weeds, improving plant drought tolerance, improving plant nutritional value, improving plant stress tolerance, avoiding self-pollination, plant forage digestibility biomass, grain yield etc. A few specific non-limiting examples are provided hereinbelow.

[0909] In addition to targeted mutation of single genes, AD-functionalized CRISPR system can be designed to allow targeted mutation of multiple genes, deletion of chromosomal fragment, site-specific integration of transgene, site-directed mutagenesis in vivo, and precise gene replacement or allele swapping in plants. Therefore, the methods described herein have broad applications in gene discovery and validation, mutational and cisgenic breeding, and hybrid breeding. These applications facilitate the production of a new generation of genetically modified crops with various improved agronomic traits such as herbicide resistance, disease resistance, abiotic stress tolerance, high yield, and superior quality.

[0910] Use of AD-Functionalized CRISPR System to Create Male Sterile Plants

[0911] Hybrid plants typically have advantageous agronomic traits compared to inbred plants. However, for self-pollinating plants, the generation of hybrids can be challenging. In different plant types, genes have been identified which are important for plant fertility, more particularly male fertility. For instance, in maize, at least two genes have been identified which are important in fertility (Amitabh Mohanty International Conference on New Plant Breeding Molecular Technologies Technology Development And Regulation, Oct. 9-10, 2014, Jaipur, India; Svitashev et al. Plant Physiol. 2015 October; 169(2):931-45; Djukanovic et al. Plant J. 2013 December; 76(5):888-99). The methods and systems provided herein can be used to target genes required for male fertility so as to generate male sterile plants which can easily be crossed to generate hybrids. In particular embodiments, the AD-functionalized CRISPR system provided herein is used for targeted mutagenesis of the cytochrome P450-like gene (MS26) or the meganuclease gene (MS45) thereby conferring male sterility to the maize plant. Maize plants which are as such genetically altered can be used in hybrid breeding programs.

[0912] Increasing the Fertility Stage in Plants

[0913] In particular embodiments, the methods and systems provided herein are used to prolong the fertility stage of a plant such as of a rice plant. For instance, a rice fertility stage gene such as Ehd3 can be targeted in order to generate a mutation in the gene and plantlets can be selected for a prolonged regeneration plant fertility stage (as described in CN 104004782)

[0914] Use of AD-functionalized CRISPR system to generate genetic variation in a crop of interest

[0915] The availability of wild germplasm and genetic variations in crop plants is the key to crop improvement programs, but the available diversity in germplasms from crop plants is limited. The present invention envisages methods for generating a diversity of genetic variations in a germplasm of interest. In this application of the AD-functionalized CRISPR system a library of guide RNAs targeting different locations in the plant genome is provided and is introduced into plant cells together with the CRISPR-Cas protein and nucleotide deaminase. In this way a collection of genome-scale point mutations and gene knock-outs can be generated. In particular embodiments, the methods comprise generating a plant part or plant from the cells so obtained and screening the cells for a trait of interest. The target genes can include both coding and non-coding regions. In particular embodiments, the trait is stress tolerance and the method is a method for the generation of stress-tolerant crop varieties

[0916] Use of AD-Functionalized CRISPR to Affect Fruit-Ripening

[0917] Ripening is a normal phase in the maturation process of fruits and vegetables. Only a few days after it starts it renders a fruit or vegetable inedible. This process brings significant losses to both farmers and consumers. In particular embodiments, the methods of the present invention are used to reduce ethylene production. This is ensured by ensuring one or more of the following: a. Suppression of ACC synthase gene expression. ACC (1-aminocyclopropane-1-carboxylic acid) synthase is the enzyme responsible for the conversion of S-adenosylmethionine (SAM) to ACC; the second to the last step in ethylene biosynthesis. Enzyme expression is hindered when an antisense (“mirror-image”) or truncated copy of the synthase gene is inserted into the plant's genome; b. Insertion of the ACC deaminase gene. The gene coding for the enzyme is obtained from Pseudomonas chlororaphis, a common nonpathogenic soil bacterium. It converts ACC to a different compound thereby reducing the amount of ACC available for ethylene production; c. Insertion of the SAM hydrolase gene. This approach is similar to ACC deaminase wherein ethylene production is hindered when the amount of its precursor metabolite is reduced; in this case SAM is converted to homoserine. The gene coding for the enzyme is obtained from E. coli T3 bacteriophage and d. Suppression of ACC oxidase gene expression. ACC oxidase is the enzyme which catalyzes the oxidation of ACC to ethylene, the last step in the ethylene biosynthetic pathway. Using the methods described herein, down regulation of the ACC oxidase gene results in the suppression of ethylene production, thereby delaying fruit ripening. In particular embodiments, additionally or alternatively to the modifications described above, the methods described herein are used to modify ethylene receptors, so as to interfere with ethylene signals obtained by the fruit. In particular embodiments, expression of the ETR1 gene, encoding an ethylene binding protein is modified, more particularly suppressed. In particular embodiments, additionally or alternatively to the modifications described above, the methods described herein are used to modify expression of the gene encoding Polygalacturonase (PG), which is the enzyme responsible for the breakdown of pectin, the substance that maintains the integrity of plant cell walls. Pectin breakdown occurs at the start of the ripening process resulting in the softening of the fruit. Accordingly, in particular embodiments, the methods described herein are used to introduce a mutation in the PG gene or to suppress activation of the PG gene in order to reduce the amount of PG enzyme produced thereby delaying pectin degradation.

[0918] Thus in particular embodiments, the methods comprise the use of the AD-functionalized CRISPR system to ensure one or more modifications of the genome of a plant cell such as described above, and regenerating a plant therefrom. In particular embodiments, the plant is a tomato plant.

[0919] Increasing Storage Life of Plants

[0920] In particular embodiments, the methods of the present invention are used to modify genes involved in the production of compounds which affect storage life of the plant or plant part. More particularly, the modification is in a gene that prevents the accumulation of reducing sugars in potato tubers. Upon high-temperature processing, these reducing sugars react with free amino acids, resulting in brown, bitter-tasting products and elevated levels of acrylamide, which is a potential carcinogen. In particular embodiments, the methods provided herein are used to reduce or inhibit expression of the vacuolar invertase gene (VInv), which encodes a protein that breaks down sucrose to glucose and fructose (Clasen et al. DOI: 10.1111/pbi.12370).

[0921] The Use of the AD-Functionalized CRISPR System to Ensure a Value Added Trait

[0922] In particular embodiments the AD-functionalized CRISPR system is used to produce nutritionally improved agricultural crops. In particular embodiments, the methods provided herein are adapted to generate “functional foods”, i.e. a modified food or food ingredient that may provide a health benefit beyond the traditional nutrients it contains and or “nutraceutical”, i.e. substances that may be considered a food or part of a food and provides health benefits, including the prevention and treatment of disease. In particular embodiments, the nutraceutical is useful in the prevention and/or treatment of one or more of cancer, diabetes, cardiovascular disease, and hypertension.

[0923] Examples of nutritionally improved crops include (Newell-McGloughlin, Plant Physiology, July 2008, Vol. 147, pp. 939-953):

[0924] Modified protein quality, content and/or amino acid composition, such as have been described for Bahiagrass (Luciani et al. 2005, Florida Genetics Conference Poster), Canola (Roesler et al., 1997, Plant Physiol 113 75-81), Maize (Cromwell et al, 1967, 1969 J Anim Sci 26 1325-1331, O'Quin et al. 2000 J Anim Sci 78 2144-2149, Yang et al. 2002, Transgenic Res 11 11-20, Young et al. 2004, Plant J 38 910-922), Potato (Yu J and Ao, 1997 Acta Bot Sin 39 329-334; Chakraborty et al. 2000, Proc Natl Acad Sci USA 97 3724-3729; Li et al. 2001) Chin Sci Bull 46 482-484, Rice (Katsube et al. 1999, Plant Physiol 120 1063-1074), Soybean (Dinkins et al. 2001, Rapp 2002, In Vitro Cell Dev Biol Plant 37 742-747), Sweet Potato (Egnin and Prakash 1997, In Vitro Cell Dev Biol 33 52A).

[0925] Essential amino acid content, such as has been described for Canola (Falco et al. 1995, Bio/Technology 13 577-582), Lupin (White et al. 2001, J Sci Food Agric 81 147-154), Maize (Lai and Messing, 2002, Agbios 2008 GM crop database (Mar. 11, 2008)), Potato (Zeh et al. 2001, Plant Physiol 127 792-802), Sorghum (Zhao et al. 2003, Kluwer Academic Publishers, Dordrecht, The Netherlands, pp 413-416), Soybean (Falco et al. 1995 Bio/Technology 13 577-582; Galili et al. 2002 Crit Rev Plant Sci 21 167-204).

[0926] Oils and Fatty acids such as for Canola (Dehesh et al. (1996) Plant J 9 167-172 [PubMed]; Del Vecchio (1996) INFORM International News on Fats, Oils and Related Materials 7 230-243; Roesler et al. (1997) Plant Physiol 113 75-81 [PMC free article][PubMed]; Froman and Ursin (2002, 2003) Abstracts of Papers of the American Chemical Society 223 U35; James et al. (2003) Am J Clin Nutr 77 1140-1145 [PubMed]; Agbios (2008, above); coton (Chapman et al. (2001). J Am Oil Chem Soc 78 941-947; Liu et al. (2002) J Am Coll Nutr 21 205S-211S [PubMed]; O'Neill (2007) Australian Life Scientist. http://www.biotechnews.com.au/index.php/id;866694817;fp;4;fpid;2 (Jun. 17, 2008), Linseed (Abbadi et al., 2004, Plant Cell 16: 2734-2748), Maize (Young et al., 2004, Plant J 38 910-922), oil palm (Jalani et al. 1997, J Am Oil Chem Soc 74 1451-1455; Parveez, 2003, AgBiotechNet 113 1-8), Rice (Anai et al., 2003, Plant Cell Rep 21 988-992), Soybean (Reddy and Thomas, 1996, Nat Biotechnol 14 639-642; Kinney and Kwolton, 1998, Blackie Academic and Professional, London, pp 193-213), Sunflower (Arcadia, Biosciences 2008)

[0927] Carbohydrates, such as Fructans described for Chicory (Smeekens (1997) Trends Plant Sci 2 286-287, Sprenger et al. (1997) FEBS Lett 400 355-358, Sevenier et al. (1998) Nat Biotechnol 16 843-846), Maize (Caimi et al. (1996) Plant Physiol 110 355-363), Potato (Hellwege et al., 1997 Plant J 12 1057-1065), Sugar Beet (Smeekens et al. 1997, above), Inulin, such as described for Potato (Hellewege et al. 2000, Proc Natl Acad Sci USA 97 8699-8704), Starch, such as described for Rice (Schwall et al. (2000) Nat Biotechnol 18 551-554, Chiang et al. (2005) Mol Breed 15 125-143),

[0928] Vitamins and carotenoids, such as described for Canola (Shintani and DellaPenna (1998) Science 282 2098-2100), Maize (Rocheford et al. (2002). J Am Coll Nutr 21 191S-198S, Cahoon et al. (2003) Nat Biotechnol 21 1082-1087, Chen et al. (2003) Proc Natl Acad Sci USA 100 3525-3530), Mustardseed (Shewmaker et al. (1999) Plant J 20 401-412, Potato (Ducreux et al., 2005, J Exp Bot 56 81-89), Rice (Ye et al. (2000) Science 287 303-305, Strawberry (Agius et al. (2003), Nat Biotechnol 21 177-181), Tomato (Rosati et al. (2000) Plant J 24 413-419, Fraser et al. (2001) J Sci Food Agric 81 822-827, Mehta et al. (2002) Nat Biotechnol 20 613-618, Diaz de la Garza et al. (2004) Proc Natl Acad Sci USA 101 13720-13725, Enfissi et al. (2005) Plant Biotechnol J 3 17-27, DellaPenna (2007) Proc Natl Acad Sci USA 104 3675-3676.

[0929] Functional secondary metabolites, such as described for Apple (stilbenes, Szankowski et al. (2003) Plant Cell Rep 22: 141-149), Alfalfa (resveratrol, Hipskind and Paiva (2000) Mol Plant Microbe Interact 13 551-562), Kiwi (resveratrol, Kobayashi et al. (2000) Plant Cell Rep 19 904-910), Maize and Soybean (flavonoids, Yu et al. (2000) Plant Physiol 124 781-794), Potato (anthocyanin and alkaloid glycoside, Lukaszewicz et al. (2004) J Agric Food Chem 52 1526-1533), Rice (flavonoids & resveratrol, Stark-Lorenzen et al. (1997) Plant Cell Rep 16 668-673, Shin et al. (2006) Plant Biotechnol J 4 303-315), Tomato (+resveratrol, chlorogenic acid, flavonoids, stilbene; Rosati et al. (2000) above, Muir et al. (2001) Nature 19 470-474, Niggeweg et al. (2004) Nat Biotechnol 22 746-754, Giovinazzo et al. (2005) Plant Biotechnol J 3 57-69), wheat (caffeic and ferulic acids, resveratrol; United Press International (2002)); and

[0930] Mineral availabilities such as described for Alfalfa (phytase, Austin-Phillips et al. (1999) http://www.molecularfarming.com/nonmedical.html), Lettuse (iron, Goto et al. (2000) Theor Appl Genet 100 658-664), Rice (iron, Lucca et al. (2002) J Am Coll Nutr 21 184S-190S), Maize, Soybean and wheate (phytase, Drakakaki et al. (2005) Plant Mol Biol 59 869-880, Denbow et al. (1998) Poult Sci 77 878-881, Brinch-Pedersen et al. (2000) Mol Breed 6 195-206).

[0931] In particular embodiments, the value-added trait is related to the envisaged health benefits of the compounds present in the plant. For instance, in particular embodiments, the value-added crop is obtained by applying the methods of the invention to ensure the modification of or induce/increase the synthesis of one or more of the following compounds:
[0932] Carotenoids, such as α-Carotene present in carrots which Neutralizes free radicals that may cause damage to cells or β-Carotene present in various fruits and vegetables which neutralizes free radicals;
[0933] Lutein present in green vegetables which contributes to maintenance of healthy vision;
[0934] Lycopene present in tomato and tomato products, which is believed to reduce the risk of prostate cancer;
[0935] Zeaxanthin, present in citrus and maize, which contributes to mainteance of healthy vision
[0936] Dietary fiber such as insoluble fiber present in wheat bran which may reduce the risk of breast and/or colon cancer and β-Glucan present in oat, soluble fiber present in Psylium and whole cereal grains which may reduce the risk of cardiovascular disease (CVD);
[0937] Fatty acids, such as ω-3 fatty acids which may reduce the risk of CVD and improve mental and visual functions, Conjugated linoleic acid, which may improve body composition, may decrease risk of certain cancers and GLA which may reduce inflammation risk of cancer and CVD, may improve body composition;
[0938] Flavonoids such as Hydroxycinnamates, present in wheat which have Antioxidant-like activities, may reduce risk of degenerative diseases, flavonols, catechins and tannins present in fruits and vegetables which neutralize free radicals and may reduce risk of cancer;
[0939] Glucosinolates, indoles, isothiocyanates, such as Sulforaphane, present in Cruciferous vegetables (broccoli, kale), horseradish, which neutralize free radicals, may reduce risk of cancer;
[0940] Phenolics, such as stilbenes present in grape which May reduce risk of degenerative diseases, heart disease, and cancer, may have longevity effect and caffeic acid and ferulic acid present in vegetables and citrus which have Antioxidant-like activities, may reduce risk of degenerative diseases, heart disease, and eye disease, and epicatechin present in cacao which has Antioxidant-like activities, may reduce risk of degenerative diseases and heart disease;
[0941] Plant stanols/sterols present in maize, soy, wheat and wooden oils which May reduce risk of coronary heart disease by lowering blood cholesterol levels;
[0942] Fructans, inulins, fructo-oligosaccharides present in Jerusalem artichoke, shallot, onion powder which may improve gastrointestinal health;
[0943] Saponins present in soybean, which may lower LDL cholesterol;
[0944] Soybean protein present in soybean which may reduce risk of heart disease;
[0945] Phytoestrogens such as isoflavones present in soybean which May reduce menopause symptoms, such as hot flashes, may reduce osteoporosis and CVD and lignans present in flax, rye and vegetables, which May protect against heart disease and some cancers, may lower LDL cholesterol, total cholesterol;
[0946] Sulfides and thiols such as diallyl sulphide present in onion, garlic, olive, leek and scallon and Allyl methyl trisulfide, dithiolthiones present in cruciferous vegetables which may lower LDL cholesterol, helps to maintain healthy immune system; and
[0947] Tannins, such as proanthocyanidins, present in cranberry, cocoa, which may improve urinary tract health, may reduce risk of CVD and high blood pressure.

[0948] In addition, the methods of the present invention also envisage modifying protein/starch functionality, shelf life, taste/aesthetics, fiber quality, and allergen, antinutrient, and toxin reduction traits.

[0949] Accordingly, the invention encompasses methods for producing plants with nutritional added value, said methods comprising introducing into a plant cell a gene encoding an enzyme involved in the production of a component of added nutritional value using the AD-functionalized CRISPR system as described herein and regenerating a plant from said plant cell, said plant characterized in an increase expression of said component of added nutritional value. In particular embodiments, the AD-functionalized CRISPR system is used to modify the endogenous synthesis of these compounds indirectly, e.g. by modifying one or more transcription factors that controls the metabolism of this compound. Methods for introducing a gene of interest into a plant cell and/or modifying an endogenous gene using the AD-functionalized CRISPR system are described herein above.

[0950] Some specific examples of modifications in plants that have been modified to confer value-added traits are: plants with modified fatty acid metabolism, for example, by transforming a plant with an antisense gene of stearyl-ACP desaturase to increase stearic acid content of the plant. See Knultzon et al., Proc. Natl. Acad. Sci. U.S.A. 89:2624 (1992). Another example involves decreasing phytate content, for example by cloning and then reintroducing DNA associated with the single allele which may be responsible for maize mutants characterized by low levels of phytic acid. See Raboy et al, Maydica 35:383 (1990).

[0951] Similarly, expression of the maize (Zea mays) Tfs C1 and R, which regulate the production of flavonoids in maize aleurone layers under the control of a strong promoter, resulted in a high accumulation rate of anthocyanins in Arabidopsis (Arabidopsis thaliana), presumably by activating the entire pathway (Bruce et al., 2000, Plant Cell 12:65-80). DellaPenna (Welsch et al., 2007 Annu Rev Plant Biol 57: 711-738) found that Tf RAP2.2 and its interacting partner SINAT2 increased carotenogenesis in Arabidopsis leaves. Expressing the Tf Dof1 induced the up-regulation of genes encoding enzymes for carbon skeleton production, a marked increase of amino acid content, and a reduction of the Glc level in transgenic Arabidopsis (Yanagisawa, 2004 Plant Cell Physiol 45: 386-391), and the DOF Tf AtDofl.1 (OBP2) up-regulated all steps in the glucosinolate biosynthetic pathway in Arabidopsis (Skirycz et al., 2006 Plant J 47: 10-24).

### Reducing Allergen in Plants

[0952] In particular embodiments the methods provided herein are used to generate plants with a reduced level of allergens, making them safer for the consumer. In particular embodiments, the methods comprise modifying expression of one or more genes responsible for the production of plant allergens. For instance, in particular embodiments, the methods comprise down-regulating expression of a Lol p5 gene in a plant cell, such as a ryegrass plant cell and regenerating a plant therefrom so as to reduce allergenicity of the pollen of said plant (Bhalla et al. 1999, Proc. Natl. Acad. Sci. USA Vol. 96: 11676-11680).

[0953] Peanut allergies and allergies to legumes generally are a real and serious health concern. The AD-functionalized CRISPR system of the present invention can be used to identify and then mutate genes encoding allergenic proteins of such legumes. Without limitation as to such genes and proteins, Nicolaou et al. identifies allergenic proteins in peanuts, soybeans, lentils, peas, lupin, green beans, and mung beans. See, Nicolaou et al., Current Opinion in Allergy and Clinical Immunology 2011; 11(3):222).

### Screening Methods for Endogenous Genes of Interest

[0954] The methods provided herein further allow the identification of genes of value encoding enzymes involved in the production of a component of added nutritional value or generally genes affecting agronomic traits of interest, across species, phyla, and plant kingdom. By selectively targeting e.g. genes encoding enzymes of metabolic pathways in plants using the AD-functionalized CRISPR system as described herein, the genes responsible for certain nutritional aspects of a plant can be identified. Similarly, by selectively targeting genes which may affect a desirable agronomic trait, the relevant genes can be identified. Accordingly, the present invention encompasses screening methods for genes encoding enzymes involved in the production of compounds with a particular nutritional value and/or agronomic traits.

### Further Applications of the AD-Functionalized CRISPR System in Plants and Yeasts Use of AD-Functionalized CRISPR System in Biofuel Production

[0955] The term “biofuel” as used herein is an alternative fuel made from plant and plant-derived resources. Renewable biofuels can be extracted from organic matter whose energy has been obtained through a process of carbon fixation or are made through the use or conversion of biomass. This biomass can be used directly for biofuels or can be converted to convenient energy containing substances by thermal conversion, chemical conversion, and biochemical conversion. This biomass conversion can result in fuel in solid, liquid, or gas form. There are two types of biofuels: bioethanol and biodiesel. Bioethanol is mainly produced by the sugar fermentation process of cellulose (starch), which is mostly derived from maize and sugar cane. Biodiesel on the other hand is mainly produced from oil crops such as rapeseed, palm, and soybean. Biofuels are used mainly for transportation.

### Enhancing Plant Properties for Biofuel Production

[0956] In particular embodiments, the methods using the AD-functionalized CRISPR system as described herein are used to alter the properties of the cell wall in order to facilitate access by key hydrolysing agents for a more efficient release of sugars for fermentation. In particular embodiments, the biosynthesis of cellulose and/or lignin are modified. Cellulose is the major component of the cell wall. The biosynthesis of cellulose and lignin are co-regulated. By reducing the proportion of lignin in a plant the proportion of cellulose can be increased. In particular embodiments, the methods described herein are used to downregulate lignin biosynthesis in the plant so as to increase fermentable carbohydrates. More particularly, the methods described herein are used to downregulate at least a first lignin biosynthesis gene selected from the group consisting of 4-coumarate 3-hydroxylase (C3H), phenylalanine ammonia-lyase (PAL), cinnamate 4-hydroxylase (C4H), hydroxycinnamoyl transferase (HCT), caffeic acid O-methyltransferase (COMT), caffeoyl CoA 3-O-methyltransferase (CCoAOMT), ferulate 5-hydroxylase (F5H), cinnamyl alcohol dehydrogenase (CAD), cinnamoyl CoA-reductase (CCR), 4-coumarate-CoA ligase (4CL), monolignol-lignin-specific glycosyltransferase, and aldehyde dehydrogenase (ALDH) as disclosed in WO 2008064289 A2.

[0957] In particular embodiments, the methods described herein are used to produce plant mass that produces lower levels of acetic acid during fermentation (see also WO 2010096488). More particularly, the methods disclosed herein are used to generate mutations in homologs to CaslL to reduce polysaccharide acetylation.

### Modifying Yeast for Biofuel Production

[0958] In particular embodiments, the AD-functionalized CRISPR system provided herein is used for bioethanol production by recombinant micro-organisms. For instance, the AD-functionalized CRISPR system can be used to engineer micro-organisms, such as yeast, to generate biofuel or biopolymers from fermentable sugars and optionally to be able to degrade plant-derived lignocellulose derived from agricultural waste as a source of fermentable sugars. In some embodiments, the AD-functionalized CRISPR system is used to modify endogenous metabolic pathways which compete with the biofuel production pathway.

[0959] Accordingly, in more particular embodiments, the methods described herein are used to modify a micro-organism as follows: to modify at least one nucleic acid encoding for an enzyme in a metabolic pathway in said host cell, wherein said pathway produces a metabolite other than acetaldehyde from pyruvate or ethanol from acetaldehyde, and wherein said modification results in a reduced production of said metabolite, or to introduce at least one nucleic acid encoding for an inhibitor of said enzyme.

### Modifying Algae and Plants for Production of Vegetable Oils or Biofuels

[0960] Transgenic algae or other plants such as rape may be particularly useful in the production of vegetable oils or biofuels such as alcohols (especially methanol and ethanol), for instance. These may be engineered to express or overexpress high levels of oil or alcohols for use in the oil or biofuel industries.

[0961] According to particular embodiments of the invention, the AD-functionalized CRISPR system is used to generate lipid-rich diatoms which are useful in biofuel production.

[0962] In particular embodiments it is envisaged to specifically modify genes that are involved in the modification of the quantity of lipids and/or the quality of the lipids produced by the algal cell. Examples of genes encoding enzymes involved in the pathways of fatty acid synthesis can encode proteins having for instance acetyl-CoA carboxylase, fatty acid synthase, 3-ketoacyl_acyl-carrier protein synthase III, glycerol-3-phospate deshydrogenase (G3PDH), Enoyl-acyl carrier protein reductase (Enoyl-ACP-reductase), glycerol-3-phosphate acyltransferase, lysophosphatidic acyl transferase or diacylglycerol acyltransferase, phospholipid:diacylglycerol acyltransferase, phoshatidate phosphatase, fatty acid thioesterase such as palmitoyi protein thioesterase, or malic enzyme activities. In further embodiments it is envisaged to generate diatoms that have increased lipid accumulation. This can be achieved by targeting genes that decrease lipid catabolisation. Of particular interest for use in the methods of the present invention are genes involved in the activation of both triacylglycerol and free fatty acids, as well as genes directly involved in β-oxidation of fatty acids, such as acyl-CoA synthetase, 3-ketoacyl-CoA thiolase, acyl-CoA oxidase activity and phosphoglucomutase. The AD-functionalized CRISPR system and methods described herein can be used to specifically activate such genes in diatoms as to increase their lipid content.

[0963] Organisms such as microalgae are widely used for synthetic biology. Stovicek et al. (Metab. Eng. Comm., 2015; 2:13 describes genome editing of industrial yeast, for example, Saccharomyces cerevisae, to efficiently produce robust strains for industrial production. Stovicek used a CRISPR-Cas9 system codon-optimized for yeast to simultaneously disrupt both alleles of an endogenous gene and knock in a heterologous gene. Cas9 and guide RNA were expressed from genomic or episomal 2-based vector locations. The authors also showed that gene disruption efficiency could be improved by optimization of the levels of Cas9 and guide RNA expression. Hlavovi et al. (Biotechnol. Adv. 2015) discusses development of species or strains of microalgae using techniques such as CRISPR to target nuclear and chloroplast genes for insertional mutagenesis and screening.

[0964] U.S. Pat. No. 8,945,839 describes a method for engineering Micro-Algae (Chlamydomonas reinhardtii cells) species) using Cas9. Using similar tools, the methods of the AD-functionalized CRISPR system described herein can be applied on Chlamydomonas species and other algae. In particular embodiments, a CRISPR-Cas protein (e.g., Cas13), nucleotide deaminase (which may be fused to the CRISPR-Cas protein or an aptamer-binding adaptor protein), and guide RNA are introduced in algae expressed using a vector that expresses the CRISPR-Cas protein and optionally the nucleotide deaminase under the control of a constitutive promoter such as Hsp70A-Rbc S2 or Beta2-tubulin. Guide RNA will be delivered using a vector containing T7 promoter. Alternatively, mRNA and in vitro transcribed guide RNA can be delivered to algal cells. Electroporation protocol follows standard recommended protocol from the GeneArt Chlamydomonas Engineering kit.

### The Use of AD-Functionalized CRISPR System in the Generation of Micro-Organisms Capable of Fatty Acid Production

[0965] In particular embodiments, the methods of the invention are used for the generation of genetically engineered micro-organisms capable of the production of fatty esters, such as fatty acid methyl esters (“FAME”) and fatty acid ethyl esters (“FAEE”),

[0966] Typically, host cells can be engineered to produce fatty esters from a carbon source, such as an alcohol, present in the medium, by expression or overexpression of a gene encoding a thioesterase, a gene encoding an acyl-CoA synthase, and a gene encoding an ester synthase. Accordingly, the methods provided herein are used to modify a micro-organisms so as to overexpress or introduce a thioesterase gene, a gene encloding an acyl-CoA synthase, and a gene encoding an ester synthase. In particular embodiments, the thioesterase gene is selected from tesA, 'tesA, tesB, fatB, fatB2, fatB3, fatA1, or fatA. In particular embodiments, the gene encoding an acyl-CoA synthase is selected from fadDJadK, BH3103, pfl-4354, EAV15023, fadD1, fadD2, RPC_4074, fadDD35, fadDD22, faa39, or an identified gene encoding an enzyme having the same properties. In particular embodiments, the gene encoding an ester synthase is a gene encoding a synthase/acyl-CoA:diacylglycerl acyltransferase from Simmondsia chinensis, Acinetobacter sp. ADP, Alcanivorax borkumensis, Pseudomonas aeruginosa, Fundibacter jadensis, Arabidopsis thaliana, or Alkaligenes eutrophus, or a variant thereof.

[0967] Additionally or alternatively, the methods provided herein are used to decrease expression in said micro-organism of of at least one of a gene encoding an acyl-CoA dehydrogenase, a gene encoding an outer membrane protein receptor, and a gene encoding a transcriptional regulator of fatty acid biosynthesis. In particular embodiments one or more of these genes is inactivated, such as by introduction of a mutation.

[0968] In particular embodiments, the gene encoding an acyl-CoA dehydrogenase is fadE. In particular embodiments, the gene encoding a transcriptional regulator of fatty acid biosynthesis encodes a DNA transcription repressor, for example, fabR.

[0969] Additionally or alternatively, said micro-organism is modified to reduce expression of at least one of a gene encoding a pyruvate formate lyase, a gene encoding a lactate dehydrogenase, or both. In particular embodiments, the gene encoding a pyruvate formate lyase is pflB. In particular embodiments, the gene encoding a lactate dehydrogenase is IdhA. In particular embodiments one or more of these genes is inactivated, such as by introduction of a mutation therein.

[0970] In particular embodiments, the micro-organism is selected from the genus Escherichia, Bacillus, Lactobacillus, Rhodococcus, Synechococcus, Synechoystis, Pseudomonas, Aspergillus, Trichoderma, Neurospora, Fusarium, Humicola, Rhizomucor, Kluyveromyces, Pichia, Mucor, Myceliophtora, Penicillium, Phanerochaete, Pleurotus, Trametes, Chrysosporium, Saccharomyces, Stenotrophamonas, Schizosaccharomyces, Yarrowia, or Streptomyces.

### The Use of AD-Functionalized CRISPR System in the Generation of Micro-Organisms Capable of Organic Acid Production

[0971] The methods provided herein are further used to engineer micro-organisms capable of organic acid production, more particularly from pentose or hexose sugars. In particular embodiments, the methods comprise introducing into a micro-organism an exogenous LDH gene. In particular embodiments, the organic acid production in said micro-organisms is additionally or alternatively increased by inactivating endogenous genes encoding proteins involved in an endogenous metabolic pathway which produces a metabolite other than the organic acid of interest and/or wherein the endogenous metabolic pathway consumes the organic acid. In particular embodiments, the modification ensures that the production of the metabolite other than the organic acid of interest is reduced. According to particular embodiments, the methods are used to introduce at least one engineered gene deletion and/or inactivation of an endogenous pathway in which the organic acid is consumed or a gene encoding a product involved in an endogenous pathway which produces a metabolite other than the organic acid of interest. In particular embodiments, the at least one engineered gene deletion or inactivation is in one or more gene encoding an enzyme selected from the group consisting of pyruvate decarboxylase (pdc), fumarate reductase, alcohol dehydrogenase (adh), acetaldehyde dehydrogenase, phosphoenolpyruvate carboxylase (ppc), D-lactate dehydrogenase (d-ldh), L-lactate dehydrogenase (1-ldh), lactate 2-monooxygenase. In further embodiments the at least one engineered gene deletion and/or inactivation is in an endogenous gene encoding pyruvate decarboxylase (pdc).

[0972] In further embodiments, the micro-organism is engineered to produce lactic acid and the at least one engineered gene deletion and/or inactivation is in an endogenous gene encoding lactate dehydrogenase. Additionally or alternatively, the micro-organism comprises at least one engineered gene deletion or inactivation of an endogenous gene encoding a cytochrome-dependent lactate dehydrogenase, such as a cytochrome B2-dependent L-lactate dehydrogenase.

### The Use of AD-Functionalized CRISPR System in the Generation of Improved Xylose or Cellobiose Utilizing Yeasts Strains

[0973] In particular embodiments, the AD-functionalized CRISPR system may be applied to select for improved xylose or cellobiose utilizing yeast strains. Error-prone PCR can be used to amplify one (or more) genes involved in the xylose utilization or cellobiose utilization pathways. Examples of genes involved in xylose utilization pathways and cellobiose utilization pathways may include, without limitation, those described in Ha, S. J., et al. (2011) Proc. Natl. Acad. Sci. USA 108(2):504-9 and Galazka, J. M., et al. (2010) Science 330(6000):84-6. Resulting libraries of double-stranded DNA molecules, each comprising a random mutation in such a selected gene could be co-transformed with the components of the AD-functionalized CRISPR system into a yeast strain (for instance S288C) and strains can be selected with enhanced xylose or cellobiose utilization capacity, as described in WO2015138855.

### The Use of AD-Functionalized CRISPR System in the Generation of Improved Yeasts Strains for Use in Isoprenoid Biosynthesis

[0974] Tadas Jakociunas et al. described the successful application of a multiplex CRISPR-Cas9 system for genome engineering of up to 5 different genomic loci in one transformation step in baker's yeast Saccharomyces cerevisiae (Metabolic Engineering Volume 28, March 2015, Pages 213-222) resulting in strains with high mevalonate production, a key intermediate for the industrially important isoprenoid biosynthesis pathway. In particular embodiments, the AD-functionalized CRISPR system may be applied in a multiplex genome engineering method as described herein for identifying additional high producing yeast strains for use in isoprenoid synthesis.

[0975] Improved Plants and Yeast Cells

[0976] The present invention also provides plants and yeast cells obtainable and obtained by the methods provided herein. The improved plants obtained by the methods described herein may be useful in food or feed production through expression of genes which, for instance ensure tolerance to plant pests, herbicides, drought, low or high temperatures, excessive water, etc.

[0977] The improved plants obtained by the methods described herein, especially crops and algae may be useful in food or feed production through expression of, for instance, higher protein, carbohydrate, nutrient or vitamin levels than would normally be seen in the wildtype. In this regard, improved plants, especially pulses and tubers are preferred.

[0978] Improved algae or other plants such as rape may be particularly useful in the production of vegetable oils or biofuels such as alcohols (especially methanol and ethanol), for instance. These may be engineered to express or overexpress high levels of oil or alcohols for use in the oil or biofuel industries.

[0979] The invention also provides for improved parts of a plant. Plant parts include, but are not limited to, leaves, stems, roots, tubers, seeds, endosperm, ovule, and pollen. Plant parts as envisaged herein may be viable, nonviable, regeneratable, and/or non-regeneratable.

[0980] It is also encompassed herein to provide plant cells and plants generated according to the methods of the invention. Gametes, seeds, embryos, either zygotic or somatic, progeny or hybrids of plants comprising the genetic modification, which are produced by traditional breeding methods, are also included within the scope of the present invention. Such plants may contain a heterologous or foreign DNA sequence inserted at or instead of a target sequence. Alternatively, such plants may contain only an alteration (mutation, deletion, insertion, substitution) in one or more nucleotides. As such, such plants will only be different from their progenitor plants by the presence of the particular modification.

[0981] Thus, the invention provides a plant, animal or cell, produced by the present methods, or a progeny thereof. The progeny may be a clone of the produced plant or animal, or may result from sexual reproduction by crossing with other individuals of the same species to introgress further desirable traits into their offspring. The cell may be in vivo or ex vivo in the cases of multicellular organisms, particularly animals or plants.

[0982] The methods for genome editing using the AD-functionalized CRISPR system as described herein can be used to confer desired traits on essentially any plant, algae, fungus, yeast, etc. A wide variety of plants, algae, fungus, yeast, etc and plant algae, fungus, yeast cell or tissue systems may be engineered for the desired physiological and agronomic characteristics described herein using the nucleic acid constructs of the present disclosure and the various transformation methods mentioned above.

[0983] In particular embodiments, the methods described herein are used to modify endogenous genes or to modify their expression without the permanent introduction into the genome of the plant, algae, fungus, yeast, etc of any foreign gene, including those encoding CRISPR components, so as to avoid the presence of foreign DNA in the genome of the plant. This can be of interest as the regulatory requirements for non-transgenic plants are less rigorous.

[0984] The methods described herein generally result in the generation of “improved plants, algae, fungi, yeast, etc” in that they have one or more desirable traits compared to the wildtype plant. In particular embodiments, non-transgenic genetically modified plants, algae, fungi, yeast, etc., parts or cells are obtained, in that no exogenous DNA sequence is incorporated into the genome of any of the cells of the plant. In such embodiments, the improved plants, algae, fungi, yeast, etc. are non-transgenic. Where only the modification of an endogenous gene is ensured and no foreign genes are introduced or maintained in the plant, algae, fungi, yeast, etc. genome, the resulting genetically modified crops contain no foreign genes and can thus basically be considered non-transgenic. The different applications of the AD-functionalized CRISPR system for plant, algae, fungi, yeast, etc. genome editing include, but are not limited to: editing of endogenous genes to confer an agricultural trait of interest. Examplary genes conferring agronomic traits include, but are not limited to genes that confer resistance to pests or diseases; genes involved in plant diseases, such as those listed in WO 2013046247; genes that confer resistance to herbicides, fungicides, or the like; genes involved in (abiotic) stress tolerance. Other aspects of the use of the CRISPR-Cas system include, but are not limited to: create (male) sterile plants; increasing the fertility stage in plants/algae etc; generate genetic variation in a crop of interest; affect fruit-ripening; increasing storage life of plants/algae etc; reducing allergen in plants/algae etc; ensure a value added trait (e.g. nutritional improvement); Sscreening methods for endogenous genes of interest; biofuel, fatty acid, organic acid, etc production.

[0985] The invention further relates to the following aspects, which are described hereinbelow as numbered statements:

[0986] 1. An engineered, non-naturally occurring system suitable for modifying post-translational modification sites on a protein encoded by a target RNA, comprising: (a) a catalytically inactive (dead) Cas13 protein, or a nucleotide sequence encoding said dead Cas13; (b) a nucleotide deaminase protein or catalytic domain thereof, or a nucleotide sequence encoding said nucleotide deaminase protein or catalytic domain thereof; and (c) a guide molecule comprising a guide sequence designed to have a degree of complementarity with a target sequence at one or more codons that comprises an adenine or cytidine and encodes an amino acid that is post-translationally modified; wherein said nucleotide deaminase or catalytic domain thereof is covalently or non-covalently linked to said dead Cas13 protein or said guide molecule, or is adapted to link thereto after delivery.

[0987] 2. The system of statement 1, wherein said guide sequence comprises a non-pairing nucleotide at a position corresponding to said adenosine or cytidine resulting in a mismatch in an RNA duplex formed.

[0988] 3. The system of statement 1 or 2, wherein the system comprises a particle delivery system comprising a ribonucleoprotein complex comprising (a), (b), and (c) encapsulated within or otherwise attached to a delivery particle, the delivery particle further optionally comprising a tissue-specific, cell-specific, and/or cell compartment-specific targeting molecule.

[0989] 4. The system of any one of statements 1-3, where the system comprises a vector system comprising one or more vectors comprising: (i) a first regulatory element operably linked to a nucleotide sequence encoding said guide molecule which comprises said guide sequence; (ii) a second regulatory element operably linked to the nucleotide sequence encoding said dead Cas13 protein; and (iii) a nucleotide sequence encoding the nucleotide deaminase protein or catalytic domain thereof which is under control of said first or second regulatory element or operably linked to a third regulatory element; wherein if said nucleotide sequence encoding the nucleotide deaminase protein or catalytic domain thereof is operably linked to the third regulatory element, said nucleotide deaminase protein or catalytic domain thereof is adapted to link to said guide molecule or said Cas13 protein after expression; and wherein components (i), (ii) and (iii) are located on the same or different vectors of the system, optionally wherein said first, second, and/or third regulatory element is an inducible promoter.

[0990] 5. The system of any one of statements 1-4, wherein the nucleotide deaminase is an adenosine deaminase or a cytidine deaminase.

[0991] 6. The system of any one of statements 1-5, wherein the nucleotide deaminase is an adenosine deaminase.

[0992] 7. The method of any one of statements 1-6, wherein said adenosine deaminase protein or catalytic domain thereof is an RNA-specific adenosine deaminase and/or is a human, cephalopod, or Drosophila adenosine deaminase protein or catalytic domain thereof, preferably ADAR, optionally huADAR, optionally (hu)ADAR1 or (hu)ADAR2, preferably huADAR2 or catalytic domain thereof.

[0993] 8. The method of any one of statements 1-7, wherein said adenosine deaminase protein or catalytic domain thereof has been modified to comprise a mutation at E488, preferably E488Q, of the hADAR2-D amino acid sequence, or a corresponding position in a homologous ADAR protein and/or wherein said adenosine deaminase protein or catalytic domain thereof has been modified to comprise a mutation at T375, preferably T375G of the hADAR2-D amino acid sequence, or a corresponding position in a homologous ADAR protein; or wherein said adenosine deaminase protein or catalytic domain thereof has been modified to comprise a mutation at E1008, preferably E1008Q, of the hADAR1d amino acid sequence, or a corresponding position in a homologous ADAR protein; or wherein said adenosine deaminase protein or catalytic domain thereof has been modified to comprise one or more mutation as provided in any of FIGS. 43A-43D, 44, 45, 46A-46B, 47A-47B, or a corresponding mutation in an ADAR homologue or orthologue.

[0994] 9. The system of any one of statements 1-8, wherein the nucleotide deaminase is a cytidine deaminase.

[0995] 10. The system of any one of statements 1-9, wherein said cytidine deaminase protein or catalytic domain thereof is a human, rat or lamprey cytidine deaminase protein or catalytic domain thereof.

[0996] 11. The system of any one of statements 1-10, wherein said cytidine deaminase protein or catalytic domain thereof is an apolipoprotein B mRNA-editing complex (APOBEC) family deaminase, an activation-induced deaminase (AID), or a cytidine deaminase 1 (CDA1).

[0997] 12. The system of any one of statements 1-11, wherein said cytidine deaminase protein or catalytic domain thereof is an APOBEC1 deaminase comprising one or more mutations corresponding to W90A, W90Y, R118A, H121R, H122R, R126A, R126E, or R132E in rat APOBEC1, or an APOBEC3G deaminase comprising one or more mutations corresponding to W285A, W285Y, R313A, D316R, D317R, R320A, R320E, or R326E in human APOBEC3G.

[0998] 13. The system of any one of statements 1-12, wherein said cytidine deaminase protein or catalytic domain thereof is delivered together with a uracil glycosylase inhibitor (UGI), where said UGI is covalently linked to said cytidine deaminase protein or catalytic domain thereof and/or said catalytically inactive Cas13 protein.

[0999] 14. The system of any one of statements 1-13, wherein said Cas13 protein is Cas13a, Cas13b, or Cas13c, preferably wherein said Cas13 a Cas13 listed in any of Tables 1, 2, 3, 4, or 6 or is from a bacterial species listed in any of Tables 1, 2, 3, 4, or 6, preferably wherein said Cas13 protein is Prevotella sp. P5-125 Cas13b, Porphyromonas gulae Cas13b, or Riemerella anatipestifer Cas13b; preferably Prevotella sp. P5-125 Cas13b. 15. The system of any one of statements 1-14, wherein said nucleotide deaminase protein or catalytic domain thereof is fused to N- or C-terminus of said dead Cas13 protein, optionally by a linker, preferably where said linker is (GGGGS)3-11, GSG5 or LEPGEKPYKCPECGKSFSQSGALTRHQRTHTR, or wherein said linker is an XTEN linker.

[1000] 16. The system of any one of statements 1-15, wherein said nucleotide deaminase protein or catalytic domain thereof is linked to an adaptor protein and said guide molecule or said dead Cas13 protein comprises an aptamer sequence capable of binding to said adaptor protein, preferably wherein said adaptor protein is selected from MS2, PP7, Qβ, F2, GA, fr, JP501, M12, R17, BZ13, JP34, JP500, KU1, M11, MX1, TW18, VK, SP, FI, ID2, NL95, TW19, AP205, ϕCb5, ϕCb8r, ϕCb12r, ϕCb23r, 7s, and PRR1. 17. The system of any one of statements 1-16, wherein said adenosine deaminase protein or catalytic domain thereof is inserted into an internal loop of said dead Cas13 protein.

[1001] 18. The system of any one of statements 1-17, wherein said Cas13 protein is a Cas13a protein and said Cas13a comprises one or more mutations the two HEPN domains, particularly at position R474 and R1046 of Cas13a protein originating from Leptotrichia wadei or amino acid positions corresponding thereto of a Cas13a ortholog, or wherein said Cas13 protein is a Cas13b protein and said Cas13b comprises a mutation in one or more of positions R116, H121, R1177, H1182, preferably R116A, H121A, R1177A, H1182A of Cas13b protein originating from Bergeyella zoohelcum ATCC 43767 or amino acid positions corresponding thereto of a Cas13b ortholog, or wherein said Cas13 protein is a Cas13b protein and said Cas13b comprises a mutation in one or more of positions R128, H133, R1053, H1058, preferably H133 and H1058, preferably H133A and H1058A, of a Cas13b protein originating from Prevotella sp. P5-125 or amino acid positions corresponding thereto of a Cas13b ortholog.

[1002] 19. The system of any one of statements 1-18, said guide sequence comprises a non-pairing Cytosine at a position corresponding to said Adenine resulting in an A-C mismatch in the RNA duplex formed wherein said guide sequence has a length of from about 20 to about 53 nucleotides (nt), preferably from about 25 to about 53 nt, more preferably from about 29 to about 53 nt or from about 40 to about 50 nt capable of forming said RNA duplex with said target sequence.

[1003] 20. The system of any one of statements 1-19, wherein the distance between said non-pairing C and the 5′ end of said guide sequence is 20-30 nucleotides.

[1004] 21. The system of any one of statements 1-20, wherein said Cas13, preferably Cas13b, is truncated, preferably C-terminally truncated, preferably wherein said Cas13 is a truncated functional variant of the corresponding wild type Cas13, optionally wherein said truncated Cas13b is encoded by nt 1-984 of Prevotella sp. P5-125 Cas13b or the corresponding nt of a Cas13b orthologue or homologue.

[1005] 22. The system of any one of statements 1-21, the guide sequence comprises more than one mismatches corresponding to different adenosine sites in the target RNA or wherein two guide molecules are used, each comprising a mismatch corresponding to a different adenosine site in the target RNA.

[1006] 23. The system of any one of statements 1-22, wherein said Cas13 protein and optionally said adenosine deaminase protein or catalytic domain thereof comprise one or more heterologous nuclear export signal(s) (NES(s)) or nuclear localization signal(s) (NLS(s)), preferably an HIV Rev NES or MAPK NES, preferably C-terminal.

[1007] 24. The system of any one of statements 1-23, said target RNA is within a cell, preferably a eukaryotic cell, most preferably a human or non-human animal cell, or a plant cell.

[1008] 25. A method of modifying post-translational modification sites on a protein encoded by a target RNA comprising: contacting the target RNA with the system of any one of statements 1-24.

[1009] 26. The method of statement 25, wherein (a), (b), and (c) in the system of any one of statements 1-24 are delivered or are to be delivered as one or more polynucleotide molecules, as a ribonucleoprotein complex, optionally via particles, vesicles, or one or more viral vectors.

[1010] 27. The system of any one of statements 1-24 or the method of statement 25 or 26, for use in prophylactic or therapeutic treatment, preferably wherein said target RNA is within a human or animal.

[1011] 28. The system of any one of statements 1-24 or the method of any one of statements 25-27, for use in the treatment or prevention of a disease by inhibiting activation of pathological activation of cell signaling mediated by post-translational modification, preferably phosphorylation.

[1012] 29. The system of any one of statements 1-24 or the method of any one of statements 25-28, wherein said disease is selected from cancer, immunodeficiency diseases or disorders, infectious disease, inflammatory disorders, and neurodegenerative diseases and disorders.

[1013] 30. The system of any one of statements 1-24 or the method of any one of statements 25-29, wherein said modification changes the encoded amino acid from a serine, threonine, or tyrosine to an amino acid that cannot be phosphorylated.

[1014] 31. The system of any one of statements 1-24 or the method of any one of statements 25-30, wherein the modification inactivates a phosphorylation site of a protein involved in MDM2-p53 signaling pathway, PI3K-Akt signaling pathways, Ras signaling pathways, GPCR signaling pathway, Wnt signaling pathway, Hippo signaling pathway, TGF signaling pathway, NF-κB signaling pathway, Notch signaling pathway, Hedgehog signaling pathway, and/or cell-cycle signaling pathway.

[1015] 32. The system of any one of statements 1-24 or the method of any one of statements 25-31, wherein the modification inactivates a phosphorylation site of a protein involved in MDM2-p53 signaling pathway and PI3K-Akt signaling pathway, preferably the phosphorylation site is on MDM2 at S166, S190, S240, S242, S246, S260, S386, S395, S407, T419, S425, and/or S439, Akt at S473 and/or T308, or MDM4 at S96, Y99, S296, S342, S367, and/or S403.

[1016] 33. The system of any one of statements 1-24 or the method of any one of statements 25-32, wherein the modification inactivates a phosphorylation site of: IκBα at S32 and/or S36, NIK at T599, p100 at S866, S870, S872, Notch1 at S2152, Raf-1 at S43, S259, S338, and/or Y341, β-catenin at S33, S37, S45, and/or T41, BAD at S122 and/or S136, GSK-3β at S9, RelA(p65) at S910, YAP at S61, S109, S127, S164, S381, and/or S384, or TAZ at S66, S89, S117, and/or S311, YAP at S127, Caspase-9 at S196, MLK3 at S647, and ASK1 at S83, CREB at S133, FOXO1 at S256, S319, and T24, FOXO2 at S32, S253, and S315, and FOXO4 at S193, S258, and T28, and IKKa at T23. 34. The system of any one of statements 1-24 or the method of any one of statements 25-33, wherein the disease is a p53 WT lymphoma.

[1017] 35. The system of any one of statements 1-24 or the method of any one of statements 25-34, wherein the modification inactivates at least two or at least three phosphorylation sites of the same protein.

[1018] 36. The system of any one of statements 1-24 or the method of any one of statements 25-35, wherein at least two or at least three different guide molecules are used to target the at least two or at least three phosphorylation sites of the same protein.

[1019] 37. The system of any one of statements 1-24 or the method of any one of statements 25-36, wherein a single guide molecule is used to target the at least two or at least three phosphorylation sites of the same protein.

[1020] 38. The system of any one of statements 1-24 or the method of any one of statements 25-37, wherein the modification inactivates a phosphorylation site of at least two or at least three proteins involved in the same signaling pathway.

[1021] 39. The system of any one of statements 1-24 or the method of any one of statements 25-38, wherein the modification modulates at least two or at least three different signaling pathways selected from Akt-MDM2 signaling pathway, Ras signaling pathways, GPCR signaling pathway, Wnt signaling pathway, Hippo signaling pathway, TGFβ signaling pathway, NF-κB signaling pathway, Notch signaling pathway, Hedgehog signaling pathway, and/or cell-cycle signaling pathway.

[1022] 40. The system of any one of statements 1-24 or the method of any one of statements 25-39, wherein the modification modulates at least one p53-dependent signaling pathway and at least one p53-independent signaling pathway.

[1023] 41. A cell obtained from the method of any of the preceding claims and/or comprising the system of any one of statements 1-24, or progeny of said modified cell.

[1024] 42. The cell of statement 50 or a progeny thereof, wherein said cell is a eukaryotic cell, preferably a human or non-human animal cell, optionally a therapeutic T cell or an antibody-producing B-cell, or wherein said cell is a plant cell.

[1025] 43. A non-human animal comprising said modified cell of statement 50 or 51 or a progeny thereof.

[1026] 44. A plant comprising said cell of statement 50 or 51 or a progeny thereof.

[1027] 45. A modified cell according to statement 50 or 51 for use in therapy, preferably cell therapy.

[1028] 46. A composition comprising a library of at least 100, at least 1000, or at least 10,000 different guide molecules, wherein each guide molecule is capable of forming a complex with a Cas13 protein and directs said complex to bind a target RNA sequence encoding a phosphorylation site of a protein involved in a cell signaling pathway.

[1029] 47. A composition comprising a population of cells obtainable or obtained by: (a) introducing the library of guide molecules of claim 46 into at least 100, at least 1,000 or at least 10,000 cells, preferably at an average ratio of no more than one guide molecule per cell, the cells each expressing a catalytically inactive (dead) Cas13 protein and an adenosine deaminase protein or catalytic domain thereof, wherein the adenosine deaminase protein or catalytic domain thereof is covalently or non-covalently linked to the dead Cas13 protein or is adapted to bind the guide molecule after introduction thereof; or (b) introducing the library of guide molecules of claim 46 into at least 100, at least 1,000 or at least 10,000 cells, preferably at an average ratio of no more than one guide molecule per cell, and simultaneously or sequentially introducing to the cells one or more nucleic acid sequences encoding the catalytically inactive (dead) Cas13 protein and the adenosine deaminase protein or catalytic domain thereof.

[1030] 48. A method for identifying a phosphorylation site associated with a target phenotype, comprising: selecting cells from the population of cells of claim 47 based on a target phenotype, wherein optionally the population of cells are cancer cells and the target phenotype is apoptosis, preferably in response to a cancer drug; and determining relative representation of the guide molecules present in the selected cells and identifying a phosphorylation site associated with the target phenotype.

[1031] 49. A method for detecting hepatitis B (HBV) associated diffuse large B-cell lymphoma (DLBCL) comprising detecting one or more of TMSB4X, FAS, BCL6, KLF2, UBE2A, SGK1, CD70, BIG2, PIM1, CXCR4, DTX1, EBF1, TNFRSF14, TP53, ZFP36L1, CDK14, IKZF3, and TP73.

[1032] 50. A method for treating HBV-associated DLBCL comprising targeting TP65, TP73, TP53, or a combination thereof, CDKN1B, BCL6, KLF2; CBP/p300; and/or CD27-CD70 pathway or TNFRSF14-TNFSF14 pathway.

[1033] 51. A method of modifying post-translational modification sites on a protein encoded by a target RNA, the method comprising delivering to said target RNAs: (a) a catalytically inactive (dead) Cas13 protein; (b) a guide molecule which comprises a guide sequence linked to a direct repeat sequence; and (c) an adenosine deaminase protein or catalytic domain thereof; wherein said adenosine deaminase protein or catalytic domain thereof is covalently or non-covalently linked to said dead Cas13 protein or said guide molecule or is adapted to link thereto after delivery; wherein the guide molecule forms a complex with said dead Cas13 protein and directs said complex to bind said target RNA at one or more codons encoding an amino acid that is post-translationally modified; wherein said adenosine deaminase protein or catalytic domain thereof deaminates an Adenine or Cytidine at the one or more codons thereby changing the codon to encode for an amino acid that is not post-translationally modified, and wherein said method is an in vitro or ex vivo method when said target RNA is a human or animal RNA.

[1034] 52. An engineered, non-naturally occurring system suitable for modifying post-translational modification sites on a protein encoded by a target RNA, comprising (a) a guide molecule which comprises a guide sequence linked to a direct repeat sequence, or a nucleotide sequence encoding said guide molecule; (b) a catalytically inactive (dead) Cas13 protein, or a nucleotide sequence encoding said dead Cas13 protein; and (c) an adenosine deaminase protein or catalytic domain thereof, or a nucleotide sequence encoding said adenosine deaminase protein or catalytic domain thereof; wherein said adenosine deaminase protein or catalytic domain thereof is covalently or non-covalently linked to said dead Cas13 protein or said guide molecule or is adapted to link thereto after delivery; wherein said guide sequence is capable of hybridizing with the target RNA comprising an Adenine or Cytidine encoding said amino acid to form an RNA duplex, wherein said guide sequence comprises a non-pairing nucleotide at a position corresponding to said Adenine or Cytidine resulting in a mismatch in the RNA duplex formed, optionally wherein the system comprises a particle delivery system comprising a ribonucleoprotein complex comprising (a), (b), and (c) encapsulated within or otherwise attached to a delivery particle, the particle optionally further comprising a tissue-specific, cell-specific, and/or cell compartment-specific targeting molecule, or optionally wherein the system comprises a vector system comprising one or more vectors comprising: (i) a first regulatory element operably linked to a nucleotide sequence encoding said guide molecule which comprises said guide sequence, (ii) a second regulatory element operably linked to a nucleotide sequence encoding said dead Cas13 protein; and (iii) a nucleotide sequence encoding the adenosine deaminase protein or catalytic domain thereof which is under control of said first or second regulatory element or operably linked to a third regulatory element; wherein, if said nucleotide sequence encoding the adenosine deaminase protein or catalytic domain thereof is operably linked to the third regulatory element, said adenosine deaminase protein or catalytic domain thereof is adapted to link to said guide molecule or said Cas13 protein after expression; wherein components (i), (ii) and (iii) are located on the same or different vectors of the system, optionally wherein said first, second, and/or third regulatory element is an inducible promoter.

[1035] 53. The method of statement 51 or system of statement 52, wherein said Cas13 protein is Cas13a, Cas13b, or Cas13c, preferably wherein said Cas13 a Cas13 listed in any of Tables 1, 2, 3, 4, or 6 or is from a bacterial species listed in any of Tables 1, 2, 3, 4, or 6, preferably wherein said Cas13 protein is Prevotella sp. P5-125 Cas13b, Porphyromonas gulae Cas13b, or Riemerella anatipestifer Cas13b; preferably Prevotella sp. P5-125 Cas13b.

[1036] 54. The method of statement 51 or system of statement 52, wherein said adenosine deaminase protein or catalytic domain thereof is fused to N- or C-terminus of said dead Cas13 protein, optionally by a linker, preferably where said linker is (GGGGS)3-11, GSG5 or LEPGEKPYKCPECGKSFSQSGALTRHQRTHTR, or wherein said linker is an XTEN linker.

[1037] 55. The method statement 51 or system of statement 52, wherein said adenosine deaminase protein or catalytic domain thereof is linked to an adaptor protein and said guide molecule or said dead Cas13 protein comprises an aptamer sequence capable of binding to said adaptor protein, preferably wherein said adaptor protein is selected from MS2, PP7, Qβ, F2, GA, fr, JP501, M12, R17, BZ13, JP34, JP500, KU1, M11, MX1, TW18, VK, SP, FI, ID2, NL95, TW19, AP205, ϕCb5, ϕCb8r, ϕCb12r, ϕCb23r, 7s, and PRR1.

[1038] 56. The method of statement 51 or system of statement 52, wherein said adenosine deaminase protein or catalytic domain thereof is inserted into an internal loop of said dead Cas13 protein.

[1039] 57. The method statement 51 or system of statement 52, wherein said Cas13 protein is a Cas13a protein and said Cas13a comprises one or more mutations the two HEPN domains, particularly at position R474 and R1046 of Cas13a protein originating from Leptotrichia wadei or amino acid positions corresponding thereto of a Cas13a ortholog, or wherein said Cas13 protein is a Cas13b protein and said Cas13b comprises a mutation in one or more of positions R116, H121, R1177, H1182, preferably R116A, H121A, R1177A, H1182A of Cas13b protein originating from Bergeyella zoohelcum ATCC 43767 or amino acid positions corresponding thereto of a Cas13b ortholog, or wherein said Cas13 protein is a Cas13b protein and said Cas13b comprises a mutation in one or more of positions R128, H133, R1053, H1058, preferably H133 and H1058, preferably H133A and H1058A, of a Cas13b protein originating from Prevotella sp. P5-125 or amino acid positions corresponding thereto of a Cas13b ortholog.

[1040] 58. The method of statement 51 or system of statement 52, wherein said guide sequence comprises a non-pairing Cytosine at a position corresponding to said Adenine resulting in an A-C mismatch in the RNA duplex formed wherein said guide sequence has a length of from about 20 to about 53 nucleotides (nt), preferably from about 25 to about 53 nt, more preferably from about 29 to about 53 nt or from about 40 to about 50 nt capable of forming said RNA duplex with said target sequence.

[1041] 59. The method of statement 51 or system of statement 52, wherein the distance between said non-pairing C and the 5′ end of said guide sequence is 20-30 nucleotides.

[1042] 60. The method of statement 51 or system of statement 52, wherein said adenosine deaminase protein or catalytic domain thereof is an RNA-specific adenosine deaminase and/or is a human, cephalopod, or Drosophila adenosine deaminase protein or catalytic domain thereof, preferably ADAR, optionally huADAR, optionally (hu)ADAR1 or (hu)ADAR2, preferably huADAR2 or catalytic domain thereof.

[1043] 61. The method of statement 51 or system of statement 52, wherein said adenosine deaminase protein or catalytic domain thereof has been modified to comprise a mutation at E488, preferably E488Q, of the hADAR2-D amino acid sequence, or a corresponding position in a homologous ADAR protein and/or wherein said adenosine deaminase protein or catalytic domain thereof has been modified to comprise a mutation at T375, preferably T375G of the hADAR2-D amino acid sequence, or a corresponding position in a homologous ADAR protein; or wherein said adenosine deaminase protein or catalytic domain thereof has been modified to comprise a mutation at E1008, preferably E1008Q, of the hADAR1d amino acid sequence, or a corresponding position in a homologous ADAR protein; or wherein said adenosine deaminase protein or catalytic domain thereof has been modified to comprise one or more mutation as provided in any of FIGS. 43A-43D, 44, 45, 46A-46B, 47A-47B, or a corresponding mutation in an ADAR homologue or orthologue.

[1044] 62. The method of statement 51 or system of statement 52, wherein said Cas13, preferably Cas13b, is truncated, preferably C-terminally truncated, preferably wherein said Cas13 is a truncated functional variant of the corresponding wild type Cas13, optionally wherein said truncated Cas13b is encoded by nt 1-984 of Prevotella sp. P5-125 Cas13b or the corresponding nt of a Cas13b orthologue or homologue.

[1045] 63. The method of statement 51 or system of statement 52, wherein the guide sequence comprises more than one mismatches corresponding to different adenosine sites in the target RNA or wherein two guide molecules are used, each comprising a mismatch corresponding to a different adenosine site in the target RNA.

[1046] 64. The method of statement 51 or system of statement 52, wherein said Cas13 protein and optionally said adenosine deaminase protein or catalytic domain thereof comprise one or more heterologous nuclear export signal(s) (NES(s)) or nuclear localization signal(s) (NLS(s)), preferably an HIV Rev NES or MAPK NES, preferably C-terminal.

[1047] 65. The method of statement 51 or system of statement 52, wherein said target RNA is within a cell, preferably a eukaryotic cell, most preferably a human or non-human animal cell, or a plant cell.

[1048] 66. The system of statement 52 for use in prophylactic or therapeutic treatment, preferably wherein said target RNA is within a human or animal.

[1049] 67. The method of statement 51 or system of statement 52, wherein (a), (b), and (c) are delivered or are to be delivered as one or more polynucleotide molecules, as a ribonucleoprotein complex, optionally via particles, vesicles, or one or more viral vectors.

[1050] 68. The method of statement 51 or system of statement 52, for use in the treatment or prevention of a disease by inhibiting activation of pathological activation of cell signaling mediated by post-translational modification, preferably phosphorylation.

[1051] 69. The method or system of statement 68, wherein said disease is selected from cancer, immunodeficiency diseases or disorders, infectious disease, inflammatory disorders, and neurodegenerative diseases and disorders.

[1052] 70. The method of statement 51 or system of statement 52, wherein said modification changes the encoded amino acid from a serine, threonine, or tyrosine to an amino acid that cannot be phosphorylated.

[1053] 71. The method of statement 51 or system of statement 52, wherein the modification inactivates a phosphorylation site of a protein involved in MDM2-p53 signaling pathway, PI3K-Akt signaling pathways, Ras signaling pathways, GPCR signaling pathway, Wnt signaling pathway, Hippo signaling pathway, TGF signaling pathway, NF-κB signaling pathway, Notch signaling pathway, Hedgehog signaling pathway, and/or cell-cycle signaling pathway.

[1054] 72. The method of statement 51 or system of statement 52, wherein the modification inactivates a phosphorylation site of a protein involved in MDM2-p53 signaling pathway and PI3K-Akt signaling pathway, preferably the phosphorylation site is on MDM2 at S166, S190, S240, S242, S246, S260, S386, S395, S407, T419, S425, and/or S439, Akt at S473 and/or T308, or MDM4 at S96, Y99, S296, S342, S367, and/or S403 73. The method of statement 51 or system of statement 52, wherein the modification inactivates a phosphorylation site of: IκBα at S32 and/or S36, NIK at T599, p100 at S866, S870, S872, Notch1 at S2152, Raf-1 at S43, S259, S338, and/or Y341, 0-catenin at S33, S37, S45, and/or T41, BAD at S122 and/or S136, GSK-3β at S9, ReA(p65) at S910, YAP at S61, S109, S127, S164, S381, and/or S384, or TAZ at S66, S89, S117, and/or S311, YAP at S127, Caspase-9 at S196, MLK3 at S647, and ASK1 at S83, CREB at S133, FOXO1 at S256, S319, and T24, FOXO2 at S32, S253, and S315, and FOXO4 at S193, S258, and T28, and IKKa at T23. 74. The method or system of statement 51 or system of statement 52, wherein the disease is a p53 WT lymphoma.

[1055] 75. The method of statement 51 or system of statement 52, wherein the modification inactivates at least two or at least three phosphorylation sites of the same protein.

[1056] 76. The method or system of statement 75, wherein at least two or at least three different guide molecules are used to target the at least two or at least three phosphorylation sites of the same protein.

[1057] 77. The method or system of statement 75, wherein a single guide molecule is used to target the at least two or at least three phosphorylation sites of the same protein.

[1058] 78. The method of statement 51 or system of statement 52, wherein the modification inactivates a phosphorylation site of at least two or at least three proteins involved in the same signaling pathway.

[1059] 79. The method of statement 51 or system of statement 52, wherein the modification modulates at least two or at least three different signaling pathways selected from Akt-MDM2 signaling pathway, Ras signaling pathways, GPCR signaling pathway, Wnt signaling pathway, Hippo signaling pathway, TGFβ signaling pathway, NF-κB signaling pathway, Notch signaling pathway, Hedgehog signaling pathway, and/or cell-cycle signaling pathway.

[1060] 80. The method of statement 51 or system of statement 52, wherein the modification modulates at least one p53-dependent signaling pathway and at least one p53-independent signaling pathway.

[1061] 81. A cell obtained from the method of any of the preceding statements and/or comprising the system of any of the preceding statements, or progeny of said modified cell.

[1062] 82. The cell of statement 81 or a progeny thereof, wherein said cell is a eukaryotic cell, preferably a human or non-human animal cell, optionally a therapeutic T cell or an antibody-producing B-cell, or wherein said cell is a plant cell.

[1063] 83. A non-human animal comprising said modified cell of statement 81 or statement 82 or a progeny thereof.

[1064] 84. A plant comprising said cell of statement 81 or a progeny thereof.

[1065] 85. A modified cell according to statement 81 or 82 for use in therapy, preferably cell therapy.

[1066] 86. A composition comprising a library of at least 100, at least 1000, or at least 10,000 different guide molecules, wherein each guide molecule is capable of forming a complex with a Cas13 protein and directs said complex to bind a target RNA sequence encoding a phosphorylation site of a protein involved in a cell signaling pathway.

[1067] 87. A composition comprising a population of cells obtainable or obtained by: (a) introducing the library of guide molecules of statement 36 into at least 100, at least 1,000 or at least 10,000 cells, preferably at an average ratio of no more than one guide molecule per cell, the cells each expressing a catalytically inactive (dead) Cas13 protein and an adenosine deaminase protein or catalytic domain thereof, wherein the adenosine deaminase protein or catalytic domain thereof is covalently or non-covalently linked to the dead Cas13 protein or is adapted to bind the guide molecule after introduction thereof, or (b) introducing the library of guide molecules of statement 36 into at least 100, at least 1,000 or at least 10,000 cells, preferably at an average ratio of no more than one guide molecule per cell, and simultaneously or sequentially introducing to the cells one or more nucleic acid sequences encoding the catalytically inactive (dead) Cas13 protein and the adenosine deaminase protein or catalytic domain thereof.

[1068] 88. A method for identifying a phosphorylation site associated with a target phenotype, comprising: selecting cells from the population of cells of statement 87 based on a target phenotype, wherein optionally the population of cells are cancer cells and the target phenotype is apoptosis, preferably in response to a cancer drug; and determining relative representation of the guide molecules present in the selected cells and identifying a phosphorylation site associated with the target phenotype.

[1069] 89. A method for detecting hepatitis B (HBV) associated diffuse large B-cell lymphoma (DLBCL) comprising detecting one or more of TMSB4X, FAS, BCL6, KLF2, UBE2A, SGK1, CD70, BIG2, PIM1, CXCR4, DTX1, EBF1, TNFRSF14, TP53, ZFP36L1, CDK14, IKZF3, and TP73. 90. A method for treating HBV-associated DLBCL comprising targeting: TP65, TP73, TP53, or a combination thereof, CDKN1B, BCL6, KLF2; CBP/p300; and/or CD27-CD70 pathway or TNFRSF14-TNFSF14 pathway.

[1070] The invention is further described in the following examples, which do not limit the scope of the invention described in the claims.

### EXAMPLES

### Example 1

[1071] Adenine deaminases (ADs) is capable of deaminating adenines at specific sites in double stranded RNA.

[1072] The facts that some ADs can effect adenine deamination on DNA-RNAn RNA duplexes (e.g. Zheng et al., Nucleic Acids Research 2017) presents a unique opportunity to develop an RNA guided AD by taking advantage of the RNA duplex formed between the guide RNA and its complementary DNA target in the R-loop formed during RNA-guided DNA binding by inactive Cas13. By using inactive Cas13 to recruit an AD, the AD enzyme will then act on the adenine in the RNA-DNAn RNA duplex.

[1073] In one embodiment, an inactive Cas13, such as Cas13b is obtained using the following mutations: R116A, H121A, R1177A and H1182A. To increase the efficiency of editing by AD, a mutated ADAR is used such as the mutated hADAR2d comprising mutation E488Q.

### Designs for the Recruitment of AD to a Specific Locus:

[1074] 1. NLS-tagged inactive Cas13 is fused to AD on either the N- or C-terminal end. A variety of linkers are used including flexible linkers such as GSG5 or less flexible linkers such as LEPGEKPYKCPECGKSFSQSGALTRHQRTHTR (SEQ ID No. 11).

[1075] 2. The guide RNA scaffold is modified with aptamers such as MS2 binding sites (e.g. Konermann et al., Nature 2015). NLS-tagged AD-MS2 binding protein fusions is co-introduced into target cells along with (NLS-tagged inactive or Cas13b) and corresponding guide RNA.

[1076] 3. AD is inserted into an internal loop of NLS-tagged inactive or nickase Cas13. Designs for the RNA guide:

[1077] 1. Guide sequences of a length corresponding to that of a natural guide sequence of the Cas13 protein are designed to target the RNA of interest.

[1078] 2. RNA guide with longer than canonical length is used to form RNA duplexes outside of the protein-guide RNA-target DNA complex.

[1079] For each of these RNA guide designs, the base on the RNA that is opposite of the adenine on the target RNA strand would be specified as a C as opposed to U.

### Choice and Designs of ADs:

[1080] A number of ADs are used, and each will have varying levels of activity. These ADs

[1081] 1. Human ADARs (hADAR1, hADAR2, hADAR3)

[1082] 2. Squid Octopus vulgaris ADARs

[1083] 3. Squid Sepia ADARS; Doryteusthis opalescens ADARS

[1084] ADATs (human ADAT, Drosophila ADAT)

[1085] Mutations can also be used to increase the activity of ADAR reacting against a DNA-RNAn RNA duplex. For example, for the human ADAR genes, the hADAR1d(E1008Q) or hADAR2d(E488Q) mutation is used to increase their activity against a DNA-RNA target.

[1086] Each ADAR has varying levels of sequence context requirement. For example, for hADAR1d (E1008Q), tAg and aAg sites are efficiently deaminated, whereas aAt and cAc are less efficiently edited, and gAa and gAc are even less edited. However, the context requirement will vary for different ADARs.

[1087] A schematic showing of one version of the system is provided in FIG. 1. The amino acid sequences of example AD proteins are provided in FIG. 4.

[1088] The embodiments, illustratively described herein may suitably be practiced in the absence of any element or elements, limitation or limitations, not specifically disclosed herein. Thus, for example, the terms “comprising,” “including,” “containing,” etc. shall be read expansively and without limitation. Additionally, the terms and expressions employed herein have been used as terms of description and not of limitation, and there is no intention in the use of such terms and expressions of excluding any equivalents of the features shown and described or portions thereof, but it is recognized that various modifications are possible within the scope of the claimed technology. Additionally, the phrase “consisting essentially of” will be understood to include those elements specifically recited and those additional elements that do not materially affect the basic and novel characteristics of the claimed technology. The phrase “consisting of” excludes any element not specified.

[1089] The present disclosure is not to be limited in terms of the particular embodiments described in this application. Many modifications and variations can be made without departing from its spirit and scope, as will be apparent to those skilled in the art. Functionally equivalent methods and compositions within the scope of the disclosure, in addition to those enumerated herein, will be apparent to those skilled in the art from the foregoing descriptions. Such modifications and variations are intended to fall within the scope of the appended claims. The present disclosure is to be limited only by the terms of the appended claims, along with the full scope of equivalents to which such claims are entitled. It is to be understood that this disclosure is not limited to particular methods, reagents, compounds compositions or biological systems, which can of course vary. It is also to be understood that the terminology used herein is for the purpose of describing particular embodiments only, and is not intended to be limiting.

[1090] In addition, where features or aspects of the disclosure are described in terms of Markush groups, those skilled in the art will recognize that the disclosure is also thereby described in terms of any individual member or subgroup of members of the Markush group.

[1091] As will be understood by one skilled in the art, for any and all purposes, particularly in terms of providing a written description, all ranges disclosed herein also encompass any and all possible subranges and combinations of subranges thereof. Any listed range can be easily recognized as sufficiently describing and enabling the same range being broken down into at least equal halves, thirds, quarters, fifths, tenths, etc. As a non-limiting example, each range discussed herein can be readily broken down into a lower third, middle third and upper third, etc. As will also be understood by one skilled in the art all language such as “up to,” “at least,” “greater than,” “less than,” and the like, include the number recited and refer to ranges which can be subsequently broken down into subranges as discussed above. Finally, as will be understood by one skilled in the art, a range includes each individual member.

[1092] All publications, patent applications, issued patents, and other documents referred to in this specification are herein incorporated by reference as if each individual publication, patent application, issued patent, or other document was specifically and individually indicated to be incorporated by reference in its entirety. Definitions that are contained in text incorporated by reference are excluded to the extent that they contradict definitions in this disclosure.

### Example 2

### Cluc/Gluc Tiling for Cas13a/Cas13b Interference

[1093] To compare knockdown efficiency between Cas13α and Cas13b, Cypridina and Gaussia luciferase genes were tiled with 24 or 96 guides, respectively (FIG. 10). Guides were matched for Cas13α and Cas13b, and show increased knockdown efficiency for Cas13b, with all but one guide for each gene showing higher efficiency for Cas13b.

[1094] ADAR Editing Quantification by NGS

[1095] Cas13b-ADAR2 RNA editing efficiency was tested by designing a luciferase reporter with a premature stop codon UAG, which prevents expression of the luciferase (FIG. 11A). 7 guides of varying length were designed and positioned relative to the UAG stop codon that all contained a C mismatch to the A in the UAG. The C mismatch is known to create a bubble at the site of editing which is favored by the ADAR catalytic domain. RNA editing by Cas13b-ADAR2 would convert the UAG to a UIG (UGG), which introduces a tryptophan instead of the stop codon, and allows translation to proceed. Expression of the guides and Cas13b12-ADAR2 fusion in HEK293FT cells restored luciferase expression to varying levels with the greatest restoration occurring for guide 5 (FIG. 11). In general, there is increasing levels of editing from guides 1-5 as the editing site is moved further away from the 3′ end of the crRNA where the direct repeat is and thus where the protein binds. This likely indicates that the part of the crRNA:target duplex that is bound by the protein is inaccessible to the ADAR catalytic domain. Guides 5, 6, and 7 show the greatest amount of activity because the editing site is on the far end of the guide away from the DR/protein binding area and because their guides are much longer, generating a longer RNA duplex that is favored by ADAR. ADAR activity is optimal when the editing site is in the middle of a RNA duplex. The relative expression of luciferase activity is normalized to the non-targeting guide condition.

[1096] These samples were sequenced to precisely quantitate the RNA editing efficiency (FIG. 11C). The editing efficiency is listed in parentheses next to the guide label. Overall, the percent editing identified by sequencing matched the relative levels of luciferase expression restoration seen in FIG. 11B. Guide 5 showed the most RNA editing with a rate of 45% conversion to G at the on-target A. In some instances, there is a small amount of off-target A-G editing in the region. These may be reduced by introducing G mismatches in the guide sequence, which are disfavored by the ADAR catalytic domain.

[1097] In addition to editing the luciferase reporter transcript, guides were designed to edit out-of-frame UAG sites in the KRAS and PPIB transcripts, with two guides targeting each transcript (FIG. 12). The guides were designed with the same principles as guide 5 above (a 45nt spacer with the editing site 27nt away from the 3′ DR and a C mismatch to the editing site adenosine). The KRAS guides were able to achieve 6.5% and 13.7% editing at the on-target adenosine and the PPIB guides were able to achieve 7.7% and 9.2% editing. There are also some off-targets present for some of these guides which can be reduced by designing G mismatches in the spacers against possible off-target adenosines that are nearby. It does seem that off-targets seem to happen with the duplex region 3′ of the target adenosine.

Cas13a/b+shRNA Specificity from RNA Seq

[1098] To determine the specificity of the Cas13b12 knockdown, RNA sequencing was performed on all mRNAs across the transcriptome (FIG. 13A). The knockdown of guides targeting Gluc and KRAS was compared against non-targeting guides and found that Cas13a2 and Cas13b12 had specific knockdown of the target transcript (red dot in FIG. 13A) while the shRNAs had many off-targets as evidenced by the greater variance in the distribution. The number of significant off-targets for each of these conditions is shown in FIG. 13B. Significant off-targets are measured by a t-test with FDR correction (p<0.01) for any off-target transcripts that are changed by greater than 2 fold or less than 0.8 fold. The Cas13α and Cas13b conditions had very few off targets compared to the hundreds of off-targets found for the shRNA conditions. The knockdown efficiency for each of the conditions is shown in FIG. 13C.

### Mismatch Specificity to Reduce Off Targets (A:a or A:G)

[1099] To reduce off targets at adenosines near the target adenosine editing site, guides were designed that have Gor Amismatches to the potential off-target adenosines (FIG. 14 and Table below). Mismatches with Gor Aare not favored for activity by the ADAR catalytic domain.

| Name | Guide |
|---|---|
| Luciferase guide WT | catagaatgttctaaaCCAtcctgcgg |
| with C mismatch | cctctactctgcattcaa |
| (SEQ ID No. 162) | |
| Luciferase guide WT | catagaatgttcGaaaCCAtcctgcgg |
| with C mismatch with | cctctactctgcattcaa |
| 1 G MM | |
| (SEQ ID No. 163) | |
| Luciferase guide WT | catagaatgGtcGaaaCCAtcctgcgg |
| with C mismatch with | cctctactctgcattcaa |
| 2 G MM | |
| (SEQ ID No. 164) | |
| Luciferase guide WT | catagaatgttcAaaaCCAtcctgcgg |
| with C mismatch with | cctctactctgcattcaa |
| 1 G MM | |
| (SEQ ID No. 165) | |
| Luciferase guide WT | catagaatgAtcAaaaCCAtcctgcgg |
| with C mismatch with | cctctactctgcattcaa |
| 2 G MM | |
| (SEQ ID No. 166) | |
| KRAS guide WT with | ggtttctccatcaattacCacttgctt |
| C mismatch | cctgtaggaatcctctatt |
| (SEQ ID No. 167) | |
| KRAS guide with C | ggtttctccatcaatGacCacttgctt |
| mismatch with 1 G MM | cctgtaggaatcctctatt |
| (SEQ ID No. 168) | |
| KRAS guide with C | ggtttctccatcaaGGacCacttgctt |
| mismatch with 2 G MM | cctgtaggaatcctctatt |
| (SEQ ID No. 169) | |
| KRAS guide with C | ggtttctccatcaatAacCacttgctt |
| mismatch with 1 A MM | cctgtaggaatcctctatt |
| (SEQ ID No. 170) | |
| KRAS guide with C | ggtttctccatcaaAAacCacttgctt |
| mismatch with 2 A MM | cctgtaggaatcctctatt |
| (SEQ ID No. 171) | |
| PPIB guide WT with | gcctttctctcctgtagcCaaggccac |
| C mismatch | aaaattatccactgttttt |
| (SEQ ID No. 172) | |
| PPIB guide WT with C | gcctttctctcctgGagcCaaggccac |
| mismatch with 1 G MM | aaaattatccactgttttt |
| (SEQ ID No. 173) | |
| PPIB guide WT with C | gcctttctctcctgAagcCaaggccac |
| mismatch with 1 A MM | aaaattatccactgttttt |
| (SEQ ID No. 174) | |

[1100] The guides in the Table above were designed to have a C mismatch against the on-target adenosine to be edited and G or A mismatches against known off-target sites (based off of the RNA sequencing from above). Mismatches in the spacer sequence are capitalized.

### Mismatch for On-Target Activity

[1101] Prior research on the catalytic domain of ADAR2 has demonstrated that different bases opposite the target A can influence the amount of inosine editing (Zheng et al. (2017), Nucleic Acid Research, 45(6):3369-3377). Specifically, U and C are found opposite natural ADAR-edited A's, whereas G and A are not. To test whether or not A and G mismatches with the edited A can be used to suppress ADAR activity a guide known to be active with a C mismatch is tested with all other 3 possible bases on the luciferase reporter assay (FIG. 16). Relative activities are quantified by assessing luciferase activity. Guide sequences are provided in the Table below.

| Mismatch | Guide sequence |
|---|---|
| Mismatch-C | GcatagaatgttctaaaCCAtcctgcggc |
| (SEQ ID No. 175) | ctctactctgcattcaa |
| Mismatch-G | GcatagaatgttctaaaCGAtcctgcggc |
| (SEQ ID No. 176) | ctctactctgcattcaa |
| Mismatch-T | GcatagaatgttctaaaCTAtcctgcggc |
| (SEQ ID No. 177) | ctctactctgcattcaa |
| Mismatch-A | GcatagaatgttctaaaCAAtcctgcggc |
| (SEQ ID No. 178) | ctctactctgcattcaa |

Improvement of Editing and Reduction of Off-Target Modification by Chemical Modification of gRNAs

[1102] gRNAs which are chemically modified as exemplified in Vogel et al. (2014), Angew Chem Int Ed, 53:6267-6271, doi:10.1002/anie.201402634) to reduce off-target activity and to improve on-target efficiency. 2′-O-methyl and phosphothioate modified guide RNAs in general improve editing efficiency in cells.

### Motif Preference

[1103] ADAR has been known to demonstrate a preference for neighboring nucleotides on either side of the edited A (www.nature.com/nsmb/journal/v23/n5/full/nsmb.3203.html, Matthews et al. (2017), Nature Structural Mol Biol, 23(5): 426-433). The preference is systematically tested by targeting Cypridina luciferase transcripts with variable bases surrounding the targeted A (FIG. 17).

### Larger Bubbles to Enhance RNA Editing Efficiency

[1104] To enhance RNA editing efficiency on non-preferred 5′ or 3′ neighboring bases, intentional mismatches in neighboring bases are introduced, which has been demonstrated in vitro to allow for editing of non-preferred motifs (https://academic.oup.com/nar/article-lookup/doi/10.1093/nar/gku272; Schneider et al (2014), Nucleic Acid Res, 42(10):e87); Fukuda et al. (2017), Scienticic Reports, 7, doi:10.1038/srep41478). Additional mismatches are tested, such as guanosine substitutions, to see if they reduce natural preferences (FIG. 18).

### Editing of Multiple A's in a Transcript

[1105] Results suggest that As opposite Cs in the targeting window of the ADAR deaminase domain are preferentially edited over other bases. Additionally, As base-paired with Us within a few bases of the targeted base show low levels of editing by Cas13b-ADAR fusions, suggesting that there is flexibility for the enzyme to edit multiple As (FIG. 19). These two observations suggest that multiple As in the activity window of Cas13b-ADAR fusions could be specified for editing by mismatching all As to be edited with Cs. To test this the most promising guides from the optimization experiment are taken and multiple A:C mismatches in the activity window are designed to test the possibility of creating multiple A:I edits. The editing rates for this experiment is be quanitifed using NGS. To suppress potential off-target editing in the activity window, non-target As are paired with As or Gs (depending on the results from the base preference experiment).

### Guide Length Titration for RNA Editing

[1106] ADAR naturally works on inter- or intra-molecular RNA duplexes of >20 bp in length (see also Nishikura et al. (2010), Annu Rev Biochem, 79:321-349). The results demonstrated that longer crRNAs, resulting in longer duplexes, had higher levels of activity. To systematically compare the activity of guides of different lengths for RNA editing activity we have designed guides of 30, 50, 70 and 84 bases to correct the stop codon in our luciferase reporter assay (FIGS. 20A-20F and Table below). We have designed these guides such that the position of the edited A is present at all possible even distances within the mRNA:crRNA duplex with respect to the 3′ end of the specificity determining region of the crRNA (i.e. +2, +4 etc.).

| Sequence Name | Sequence |
|---|---|
| Guide_Cas13bC-luc_30_ADAR0Top | GCATCCTGCGGCCTCTACTCTGCATTCAATT |
| (SEQ ID No. 179) | |
| Guide_Cas13bC-luc_30_ADAR1Top | GACCATCCTGCGGCCTCTACTCTGCATTCAA |
| (SEQ ID No. 180) | |
| Guide_Cas13bC-luc_30_ADAR2Top | GAAACCATCCTGCGGCCTCTACTCTGCATTC |
| (SEQ ID No. 181) | |
| Guide_Cas13bC-luc_30_ADAR3Top | GCTAAACCATCCTGCGGCCTCTACTCTGCAT |
| (SEQ ID No. 182) | |
| Guide_Cas13bC-luc_30_ADAR4Top | GTTCTAAACCATCCTGCGGCCTCTACTCTGC |
| (SEQ ID No. 183) | |
| Guide_Cas13bC-luc_30_ADAR5Top | GTGTTCTAAACCATCCTGCGGCCTCTACTCT |
| (SEQ ID No. 184) | |
| Guide_Cas13bC-luc_30_ADAR6Top | GAATGTTCTAAACCATCCTGCGGCCTCTACT |
| (SEQ ID No. 185) | |
| Guide_Cas13bC-luc_30_ADAR7Top | GAGAATGTTCTAAACCATCCTGCGGCCTCTA |
| (SEQ ID No. 186) | |
| Guide_Cas13bC-luc_30_ADAR8Top | GATAGAATGTTCTAAACCATCCTGCGGCCTC |
| (SEQ ID No. 187) | |
| Guide_Cas13bC-luc_30_ADAR9Top | GCCATAGAATGTTCTAAACCATCCTGCGGCC |
| (SEQ ID No. 188) | |
| Guide_Cas13bC-luc_30_ADAR10Top | GTTCCATAGAATGTTCTAAACCATCCTGCGG |
| (SEQ ID No. 189) | |
| Guide_Cas13bC-luc_30_ADAR11Top | GCTTTCCATAGAATGTTCTAAACCATCCTGC |
| (SEQ ID No. 190) | |
| Guide_Cas13bC-luc_30_ADAR12Top | GCTCTTTCCATAGAATGTTCTAAACCATCCT |
| (SEQ ID No. 191) | |
| Guide_Cas13bC-luc_30_ADAR13Top | GATCTCTTTCCATAGAATGTTCTAAACCATC |
| (SEQ ID No. 192) | |
| Guide_Cas13bC-luc_30_ADAR14Top | GGAATCTCTTTCCATAGAATGTTCTAAACCA |
| (SEQ ID No. 193) | |
| Guide_Cas13bC-luc_50_ADAR0Top | GCATCCTGCGGCCTCTACTCTGCATTCAAT |
| (SEQ ID No. 194) | TACATACTGACACATTCGGCA |
| Guide_Cas13bC-luc_50_ADAR1Top | GACCATCCTGCGGCCTCTACTCTGCATTCA |
| (SEQ ID No. 195) | ATTACATACTGACACATTCGG |
| Guide_Cas13bC-luc_50_ADAR2Top | GAAACCATCCTGCGGCCTCTACTCTGCATT |
| (SEQ ID No. 196) | CAATTACATACTGACACATTC |
| Guide_Cas13bC-luc_50_ADAR3Top | GCTAAACCATCCTGCGGCCTCTACTCTGCA |
| (SEQ ID No. 197) | TTCAATTACATACTGACACAT |
| Guide_Cas13bC-luc_50_ADAR4Top | GTTCTAAACCATCCTGCGGCCTCTACTCTG |
| (SEQ ID No. 198) | CATTCAATTACATACTGACAC |
| Guide_Cas13bC-luc_50_ADAR5Top | GTGTTCTAAACCATCCTGCGGCCTCTACTC |
| (SEQ ID No. 199) | TGCATTCAATTACATACTGAC |
| Guide_Cas13bC-luc_50_ADAR6Top | GAATGTTCTAAACCATCCTGCGGCCTCTAC |
| (SEQ ID No. 200) | TCTGCATTCAATTACATACTG |
| Guide_Cas13bC-luc_50_ADAR7Top | GAGAATGTTCTAAACCATCCTGCGGCCTCT |
| (SEQ ID No. 201) | ACTCTGCATTCAATTACATAC |
| Guide_Cas13bC-luc_50_ADAR8Top | GATAGAATGTTCTAAACCATCCTGCGGCCT |
| (SEQ ID No. 202) | CTACTCTGCATTCAATTACAT |
| Guide_Cas13bC-luc_50_ADAR9Top | GCCATAGAATGTTCTAAACCATCCTGCGGC |
| (SEQ ID No. 203) | CTCTACTCTGCATTCAATTAC |
| Guide_Cas13bC-luc_50_ADAR10Top | GTTCCATAGAATGTTCTAAACCATCCTGCG |
| (SEQ ID No. 204) | GCCTCTACTCTGCATTCAATT |
| Guide_Cas13bC-luc_50_ADAR11Top | GCTTTCCATAGAATGTTCTAAACCATCCTG |
| (SEQ ID No. 205) | CGGCCTCTACTCTGCATTCAA |
| Guide_Cas13bC-luc_50_ADAR12Top | GCTCTTTCCATAGAATGTTCTAAACCATCC |
| (SEQ ID No. 206) | TGCGGCCTCTACTCTGCATTC |
| Guide_Cas13bC-luc_50_ADAR13Top | GATCTCTTTCCATAGAATGTTCTAAACCAT |
| (SEQ ID No. 207) | CCTGCGGCCTCTACTCTGCAT |
| Guide_Cas13bC-luc_50_ADAR14Top | GGAATCTCTTTCCATAGAATGTTCTAAACC |
| (SEQ ID No. 208) | ATCCTGCGGCCTCTACTCTGC |
| Guide_Cas13bC-luc_50_ADAR15Top | GTGGAATCTCTTTCCATAGAATGTTCTAAA |
| (SEQ ID No. 209) | CCATCCTGCGGCCTCTACTCT |
| Guide_Cas13bC-luc_50_ADAR16Top | GACTGGAATCTCTTTCCATAGAATGTTCTA |
| (SEQ ID No. 210) | AACCATCCTGCGGCCTCTACT |
| Guide_Cas13bC-luc_50_ADAR17Top | GGAACTGGAATCTCTTTCCATAGAATGTTC |
| (SEQ ID No. 211) | TAAACCATCCTGCGGCCTCTA |
| Guide_Cas13bC-luc_50_ADAR18Top | GTGGAACTGGAATCTCTTTCCATAGAATGT |
| (SEQ ID No. 212) | TCTAAACCATCCTGCGGCCTC |
| Guide_Cas13bC-luc_50_ADAR19Top | GCCTGGAACTGGAATCTCTTTCCATAGAAT |
| (SEQ ID No. 213) | GTTCTAAACCATCCTGCGGCC |
| Guide_Cas13bC-luc_50_ADAR20Top | GTTCCTGGAACTGGAATCTCTTTCCATAGA |
| (SEQ ID No. 214) | ATGTTCTAAACCATCCTGCGG |
| Guide_Cas13bC-luc_50_ADAR21Top | GGGTTCCTGGAACTGGAATCTCTTTCCATA |
| (SEQ ID No. 215) | GAATGTTCTAAACCATCCTGC |
| Guide_Cas13bC-luc_50_ADAR22Top | GCAGGTTCCTGGAACTGGAATCTCTTTCCA |
| (SEQ ID No. 216) | TAGAATGTTCTAAACCATCCT |
| Guide_Cas13bC-luc_50_ADAR23Top | GACCAGGTTCCTGGAACTGGAATCTCTTTC |
| (SEQ ID No. 217) | CATAGAATGTTCTAAACCATC |
| Guide_Cas13bC-luc_50_ADAR24Top | GGTACCAGGTTCCTGGAACTGGAATCTCTT |
| (SEQ ID No. 218) | TCCATAGAATGTTCTAAACCA |
| Guide_Cas13bC-luc_70_ADAR0Top | GCATCCTGCGGCCTCTACTCTGCATTCAAT |
| (SEQ ID No. 219) | TACATACTGACACATTCGGCAACATGTTTT |
| | TCCTGGTTTAT |
| Guide_Cas13bC-luc_70_ADAR1Top | GACCATCCTGCGGCCTCTACTCTGCATTCA |
| (SEQ ID No. 220) | ATTACATACTGACACATTCGGCAACATGTT |
| | TTTCCTGGTTT |
| Guide_Cas13bC-luc_70_ADAR2Top | GAAACCATCCTGCGGCCTCTACTCTGCATT |
| (SEQ ID No. 221) | CAATTACATACTGACACATTCGGCAACATG |
| | TTTTTCCTGGT |
| Guide_Cas13bC-luc_70_ADAR3Top | GCTAAACCATCCTGCGGCCTCTACTCTGCA |
| (SEQ ID No. 222) | TTCAATTACATACTGACACATTCGGCAACA |
| | TGTTTTTCCTG |
| Guide_Cas13bC-luc_70_ADAR4Top | GTTCTAAACCATCCTGCGGCCTCTACTCTG |
| (SEQ ID No. 223) | CATTCAATTACATACTGACACATTCGGCAA |
| | CATGTTTTTCC |
| Guide_Cas13bC-luc_70_ADAR5Top | GTGTTCTAAACCATCCTGCGGCCTCTACTC |
| (SEQ ID No. 224) | TGCATTCAATTACATACTGACACATTCGGC |
| | AACATGTTTTT |
| Guide_Cas13bC-luc_70_ADAR6Top | GAATGTTCTAAACCATCCTGCGGCCTCTAC |
| (SEQ ID No. 225) | TCTGCATTCAATTACATACTGACACATTCG |
| | GCAACATGTTT |
| Guide_Cas13bC-luc_70_ADAR7Top | GAGAATGTTCTAAACCATCCTGCGGCCTCT |
| (SEQ ID No. 226) | ACTCTGCATTCAATTACATACTGACACATT |
| | CGGCAACATGT |
| Guide_Cas13bC-luc_70_ADAR8Top | GATAGAATGTTCTAAACCATCCTGCGGCCT |
| (SEQ ID No. 227) | CTACTCTGCATTCAATTACATACTGACACA |
| | TTCGGCAACAT |
| Guide_Cas13bC-luc_70_ADAR9Top | GCCATAGAATGTTCTAAACCATCCTGCGGC |
| (SEQ ID No. 228) | CTCTACTCTGCATTCAATTACATACTGACA |
| | CATTCGGCAAC |
| Guide_Cas13bC-luc_70_ADAR10Top | GTTCCATAGAATGTTCTAAACCATCCTGCG |
| (SEQ ID No. 229) | GCCTCTACTCTGCATTCAATTACATACTGA |
| | CACATTCGGCA |
| Guide_Cas13bC-luc_70_ADAR11Top | GCTTTCCATAGAATGTTCTAAACCATCCTG |
| (SEQ ID No. 230) | CGGCCTCTACTCTGCATTCAATTACATACT |
| | GACACATTCGG |
| Guide_Cas13bC-luc_70_ADAR12Top | GCTCTTTCCATAGAATGTTCTAAACCATCC |
| (SEQ ID No. 231) | TGCGGCCTCTACTCTGCATTCAATTACATA |
| | CTGACACATTC |
| Guide_Cas13bC-luc_70_ADAR13Top | GATCTCTTTCCATAGAATGTTCTAAACCAT |
| (SEQ ID No. 232) | CCTGCGGCCTCTACTCTGCATTCAATTACA |
| | TACTGACACAT |
| Guide_Cas13bC-luc_70_ADAR14Top | GGAATCTCTTTCCATAGAATGTTCTAAACC |
| (SEQ ID No. 233) | ATCCTGCGGCCTCTACTCTGCATTCAATTA |
| | CATACTGACAC |
| Guide_Cas13bC-luc_70_ADAR15Top | GTGGAATCTCTTTCCATAGAATGTTCTAAA |
| (SEQ ID No. 234) | CCATCCTGCGGCCTCTACTCTGCATTCAAT |
| | TACATACTGAC |
| Guide_Cas13bC-luc_70_ADAR16Top | GACTGGAATCTCTTTCCATAGAATGTTCTA |
| (SEQ ID No. 235) | AACCATCCTGCGGCCTCTACTCTGCATTCA |
| | ATTACATACTG |
| Guide_Cas13bC-luc_70_ADAR17Top | GGAACTGGAATCTCTTTCCATAGAATGTTC |
| (SEQ ID No. 236) | TAAACCATCCTGCGGCCTCTACTCTGCATT |
| | CAATTACATAC |
| Guide_Cas13bC-luc_70_ADAR18Top | GTGGAACTGGAATCTCTTTCCATAGAATGT |
| (SEQ ID No. 237) | TCTAAACCATCCTGCGGCCTCTACTCTGCA |
| | TTCAATTACAT |
| Guide_Cas13bC-luc_70_ADAR19Top | GCCTGGAACTGGAATCTCTTTCCATAGAAT |
| (SEQ ID No. 238) | GTTCTAAACCATCCTGCGGCCTCTACTCTG |
| | CATTCAATTAC |
| Guide_Cas13bC-luc_70_ADAR20Top | GTTCCTGGAACTGGAATCTCTTTCCATAGA |
| (SEQ ID No. 239) | ATGTTCTAAACCATCCTGCGGCCTCTACTC |
| | TGCATTCAATT |
| Guide_Cas13bC-luc_70_ADAR21Top | GGGTTCCTGGAACTGGAATCTCTTTCCATA |
| (SEQ ID No. 240) | GAATGTTCTAAACCATCCTGCGGCCTCTAC |
| | TCTGCATTCAA |
| Guide_Cas13bC-luc_70_ADAR22Top | GCAGGTTCCTGGAACTGGAATCTCTTTCCA |
| (SEQ ID No. 241) | TAGAATGTTCTAAACCATCCTGCGGCCTCT |
| | ACTCTGCATTC |
| Guide_Cas13bC-luc_70_ADAR23Top | GACCAGGTTCCTGGAACTGGAATCTCTTTC |
| (SEQ ID No. 242) | CATAGAATGTTCTAAACCATCCTGCGGCCT |
| | CTACTCTGCAT |
| Guide_Cas13bC-luc_70_ADAR24Top | GGTACCAGGTTCCTGGAACTGGAATCTCTT |
| (SEQ ID No. 243) | TCCATAGAATGTTCTAAACCATCCTGCGGC |
| | CTCTACTCTGC |
| Guide_Cas13bC-luc_70_ADAR25Top | GATGTACCAGGTTCCTGGAACTGGAATCTC |
| (SEQ ID No. 244) | TTTCCATAGAATGTTCTAAACCATCCTGCG |
| | GCCTCTACTCT |
| Guide_Cas13bC-luc_70_ADAR26Top | GGTATGTACCAGGTTCCTGGAACTGGAATC |
| (SEQ ID No. 245) | TCTTTCCATAGAATGTTCTAAACCATCCTG |
| | CGGCCTCTACT |
| Guide_Cas13bC-luc_70_ADAR27Top | GACGTATGTACCAGGTTCCTGGAACTGGAA |
| (SEQ ID No. 246) | TCTCTTTCCATAGAATGTTCTAAACCATCC |
| | TGCGGCCTCTA |
| Guide_Cas13bC-luc_70_ADAR28Top | GACACGTATGTACCAGGTTCCTGGAACTGG |
| (SEQ ID No. 247) | AATCTCTTTCCATAGAATGTTCTAAACCAT |
| | CCTGCGGCCTC |
| Guide_Cas13bC-luc_70_ADAR29Top | GCAACACGTATGTACCAGGTTCCTGGAACT |
| (SEQ ID No. 248) | GGAATCTCTTTCCATAGAATGTTCTAAACC |
| | ATCCTGCGGCC |
| Guide_Cas13bC-luc_70_ADAR30Top | GCCCAACACGTATGTACCAGGTTCCTGGAA |
| (SEQ ID No. 249) | CTGGAATCTCTTTCCATAGAATGTTCTAAA |
| | CCATCCTGCGG |
| Guide_Cas13bC-luc_70_ADAR31Top | GGACCCAACACGTATGTACCAGGTTCCTGG |
| (SEQ ID No. 250) | AACTGGAATCTCTTTCCATAGAATGTTCTA |
| | AACCATCCTGC |
| Guide_Cas13bC-luc_70_ADAR32Top | GTTGACCCAACACGTATGTACCAGGTTCCT |
| (SEQ ID No. 251) | GGAACTGGAATCTCTTTCCATAGAATGTTC |
| | TAAACCATCCT |
| Guide_Cas13bC-luc_70_ADAR33Top | GCCTTGACCCAACACGTATGTACCAGGTTC |
| (SEQ ID No. 252) | CTGGAACTGGAATCTCTTTCCATAGAATGT |
| | TCTAAACCATC |
| Guide_Cas13bC-luc_70_ADAR34Top | GTTCCTTGACCCAACACGTATGTACCAGGT |
| (SEQ ID No. 253) | TCCTGGAACTGGAATCTCTTTCCATAGAAT |
| | GTTCTAAACCA |
| Guide_Cas13bC-luc_84_ADAR0Top | GCATCCTGCGGCCTCTACTCTGCATTCAAT |
| (SEQ ID No. 254) | TACATACTGACACATTCGGCAACATGTTTT |
| | TCCTGGTTTATTTTCACACAGTCCA |
| Guide_Cas13bC-luc_84_ADAR1Top | GACCATCCTGCGGCCTCTACTCTGCATTCA |
| (SEQ ID No. 255) | ATTACATACTGACACATTCGGCAACATGTT |
| | TTTCCTGGTTTATTTTCACACAGTC |
| Guide_Cas13bC-luc_84_ADAR2Top | GAAACCATCCTGCGGCCTCTACTCTGCATT |
| (SEQ ID No. 256) | CAATTACATACTGACACATTCGGCAACATG |
| | TTTTTCCTGGTTTATTTTCACACAG |
| Guide_Cas13bC-luc_84_ADAR3Top | GCTAAACCATCCTGCGGCCTCTACTCTGCA |
| (SEQ ID No. 257) | TTCAATTACATACTGACACATTCGGCAACA |
| | TGTTTTTCCTGGTTTATTTTCACAC |
| Guide_Cas13bC-luc_84_ADAR4Top | GTTCTAAACCATCCTGCGGCCTCTACTCTG |
| (SEQ ID No. 258) | CATTCAATTACATACTGACACATTCGGCAA |
| | CATGTTTTTCCTGGTTTATTTTCAC |
| Guide_Cas13bC-luc_84_ADAR5Top | GTGTTCTAAACCATCCTGCGGCCTCTACTC |
| (SEQ ID No. 259) | TGCATTCAATTACATACTGACACATTCGGC |
| | AACATGTTTTTCCTGGTTTATTTTC |
| Guide_Cas13bC-luc_84_ADAR6Top | GAATGTTCTAAACCATCCTGCGGCCTCTAC |
| (SEQ ID No. 260) | TCTGCATTCAATTACATACTGACACATTCG |
| | GCAACATGTTTTTCCTGGTTTATTT |
| Guide_Cas13bC-luc_84_ADAR7Top | GAGAATGTTCTAAACCATCCTGCGGCCTCT |
| (SEQ ID No. 261) | ACTCTGCATTCAATTACATACTGACACATT |
| | CGGCAACATGTTTTTCCTGGTTTAT |
| Guide_Cas13bC-luc_84_ADAR8Top | GATAGAATGTTCTAAACCATCCTGCGGCCT |
| (SEQ ID No. 262) | CTACTCTGCATTCAATTACATACTGACACA |
| | TTCGGCAACATGTTTTTCCTGGTTT |
| Guide_Cas13bC-luc_84_ADAR9Top | GCCATAGAATGTTCTAAACCATCCTGCGGC |
| (SEQ ID No. 263) | CTCTACTCTGCATTCAATTACATACTGACA |
| | CATTCGGCAACATGTTTTTCCTGGT |
| Guide_Cas13bC-luc_84_ADAR10Top | GTTCCATAGAATGTTCTAAACCATCCTGCG |
| (SEQ ID No. 264) | GCCTCTACTCTGCATTCAATTACATACTGA |
| | CACATTCGGCAACATGTTTTTCCTG |
| Guide_Cas13bC-luc_84_ADAR11Top | GCTTTCCATAGAATGTTCTAAACCATCCTG |
| (SEQ ID No. 265) | CGGCCTCTACTCTGCATTCAATTACATACT |
| | GACACATTCGGCAACATGTTTTTCC |
| Guide_Cas13bC-luc_84_ADAR12Top | GCTCTTTCCATAGAATGTTCTAAACCATCC |
| (SEQ ID No. 266) | TGCGGCCTCTACTCTGCATTCAATTACATA |
| | CTGACACATTCGGCAACATGTTTTT |
| Guide_Cas13bC-luc_84_ADAR13Top | GATCTCTTTCCATAGAATGTTCTAAACCAT |
| (SEQ ID No. 267) | CCTGCGGCCTCTACTCTGCATTCAATTACA |
| | TACTGACACATTCGGCAACATGTTT |
| Guide_Cas13bC-luc_84_ADAR14Top | GGAATCTCTTTCCATAGAATGTTCTAAACC |
| (SEQ ID No. 268) | ATCCTGCGGCCTCTACTCTGCATTCAATTA |
| | CATACTGACACATTCGGCAACATGT |
| Guide_Cas13bC-luc_84_ADAR15Top | GTGGAATCTCTTTCCATAGAATGTTCTAAA |
| (SEQ ID No. 269) | CCATCCTGCGGCCTCTACTCTGCATTCAAT |
| | TACATACTGACACATTCGGCAACAT |
| Guide_Cas13bC-luc_84_ADAR16Top | GACTGGAATCTCTTTCCATAGAATGTTCTA |
| (SEQ ID No. 270) | AACCATCCTGCGGCCTCTACTCTGCATTCA |
| | ATTACATACTGACACATTCGGCAAC |
| Guide_Cas13bC-luc_84_ADAR17Top | GGAACTGGAATCTCTTTCCATAGAATGTTC |
| (SEQ ID No. 271) | TAAACCATCCTGCGGCCTCTACTCTGCATT |
| | CAATTACATACTGACACATTCGGCA |
| Guide_Cas13bC-luc_84_ADAR18Top | GTGGAACTGGAATCTCTTTCCATAGAATGT |
| (SEQ ID No. 272) | TCTAAACCATCCTGCGGCCTCTACTCTGCA |
| | TTCAATTACATACTGACACATTCGG |
| Guide_Cas13bC-luc_84_ADAR19Top | GCCTGGAACTGGAATCTCTTTCCATAGAAT |
| (SEQ ID No. 273) | GTTCTAAACCATCCTGCGGCCTCTACTCTG |
| | CATTCAATTACATACTGACACATTC |
| Guide_Cas13bC-luc_84_ADAR20Top | GTTCCTGGAACTGGAATCTCTTTCCATAGA |
| (SEQ ID No. 274) | ATGTTCTAAACCATCCTGCGGCCTCTACTC |
| | TGCATTCAATTACATACTGACACAT |
| Guide_Cas13bC-luc_84_ADAR21Top | GGGTTCCTGGAACTGGAATCTCTTTCCATA |
| (SEQ ID No. 275) | GAATGTTCTAAACCATCCTGCGGCCTCTAC |
| | TCTGCATTCAATTACATACTGACAC |
| Guide_Cas13bC-luc_84_ADAR22Top | GCAGGTTCCTGGAACTGGAATCTCTTTCCA |
| (SEQ ID No. 276) | TAGAATGTTCTAAACCATCCTGCGGCCTCT |
| | ACTCTGCATTCAATTACATACTGAC |
| Guide_Cas13bC-luc_84_ADAR23Top | GACCAGGTTCCTGGAACTGGAATCTCTTTC |
| (SEQ ID No. 277) | CATAGAATGTTCTAAACCATCCTGCGGCCT |
| | CTACTCTGCATTCAATTACATACTG |
| Guide_Cas13bC-luc_84_ADAR24Top | GGTACCAGGTTCCTGGAACTGGAATCTCTT |
| (SEQ ID No. 278) | TCCATAGAATGTTCTAAACCATCCTGCGGC |
| | CTCTACTCTGCATTCAATTACATAC |
| Guide_Cas13bC-luc_84_ADAR25Top | GATGTACCAGGTTCCTGGAACTGGAATCTC |
| (SEQ ID No. 279) | TTTCCATAGAATGTTCTAAACCATCCTGCG |
| | GCCTCTACTCTGCATTCAATTACAT |
| Guide_Cas13bC-luc_84_ADAR26Top | GGTATGTACCAGGTTCCTGGAACTGGAATC |
| (SEQ ID No. 280) | TCTTTCCATAGAATGTTCTAAACCATCCTG |
| | CGGCCTCTACTCTGCATTCAATTAC |
| Guide_Cas13bC-luc_84_ADAR27Top | GACGTATGTACCAGGTTCCTGGAACTGGAA |
| (SEQ ID No. 281) | TCTCTTTCCATAGAATGTTCTAAACCATCC |
| | TGCGGCCTCTACTCTGCATTCAATT |
| Guide_Cas13bC-luc_84_ADAR28Top | GACACGTATGTACCAGGTTCCTGGAACTGG |
| (SEQ ID No. 282) | AATCTCTTTCCATAGAATGTTCTAAACCAT |
| | CCTGCGGCCTCTACTCTGCATTCAA |
| Guide_Cas13bC-luc_84_ADAR29Top | GCAACACGTATGTACCAGGTTCCTGGAACT |
| (SEQ ID No. 283) | GGAATCTCTTTCCATAGAATGTTCTAAACC |
| | ATCCTGCGGCCTCTACTCTGCATTC |
| Guide_Cas13bC-luc_84_ADAR30Top | GCCCAACACGTATGTACCAGGTTCCTGGAA |
| (SEQ ID No. 284) | CTGGAATCTCTTTCCATAGAATGTTCTAAA |
| | CCATCCTGCGGCCTCTACTCTGCAT |
| Guide_Cas13bC-luc_84_ADAR31Top | GGACCCAACACGTATGTACCAGGTTCCTGG |
| (SEQ ID No. 285) | AACTGGAATCTCTTTCCATAGAATGTTCTA |
| | AACCATCCTGCGGCCTCTACTCTGC |
| Guide_Cas13bC-luc_84_ADAR32Top | GTTGACCCAACACGTATGTACCAGGTTCCT |
| (SEQ ID No. 286) | GGAACTGGAATCTCTTTCCATAGAATGTTC |
| | TAAACCATCCTGCGGCCTCTACTCT |
| Guide_Cas13bC-luc_84_ADAR33Top | GCCTTGACCCAACACGTATGTACCAGGTTC |
| (SEQ ID No. 287) | CTGGAACTGGAATCTCTTTCCATAGAATGT |
| | TCTAAACCATCCTGCGGCCTCTACT |
| Guide_Cas13bC-luc_84_ADAR34Top | GTTCCTTGACCCAACACGTATGTACCAGGT |
| (SEQ ID No. 288) | TCCTGGAACTGGAATCTCTTTCCATAGAAT |
| | GTTCTAAACCATCCTGCGGCCTCTA |
| Guide_Cas13bC-luc_84_ADAR35Top | GGGTTCCTTGACCCAACACGTATGTACCAG |
| (SEQ ID No. 289) | GTTCCTGGAACTGGAATCTCTTTCCATAGA |
| | ATGTTCTAAACCATCCTGCGGCCTC |
| Guide_Cas13bC-luc_84_ADAR36Top | GTTGGTTCCTTGACCCAACACGTATGTACC |
| (SEQ ID No. 290) | AGGTTCCTGGAACTGGAATCTCTTTCCATA |
| | GAATGTTCTAAACCATCCTGCGGCC |
| Guide_Cas13bC-luc_84_ADAR37Top | GCCTTGGTTCCTTGACCCAACACGTATGTA |
| (SEQ ID No. 291) | CCAGGTTCCTGGAACTGGAATCTCTTTCCA |
| | TAGAATGTTCTAAACCATCCTGCGG |
| Guide_Cas13bC-luc_84_ADAR38Top | GGCCCTTGGTTCCTTGACCCAACACGTATG |
| (SEQ ID No. 292) | TACCAGGTTCCTGGAACTGGAATCTCTTTC |
| | CATAGAATGTTCTAAACCATCCTGC |
| Guide_Cas13bC-luc_84_ADAR39Top | GCCGCCCTTGGTTCCTTGACCCAACACGTA |
| (SEQ ID No. 293) | TGTACCAGGTTCCTGGAACTGGAATCTCTT |
| | TCCATAGAATGTTCTAAACCATCCT |
| Guide_Cas13bC-luc_84_ADAR40Top | GCGCCGCCCTTGGTTCCTTGACCCAACACG |
| (SEQ ID No. 294) | TATGTACCAGGTTCCTGGAACTGGAATCTC |
| | TTTCCATAGAATGTTCTAAACCATC |
| Guide_Cas13bC-luc_84_ADAR41Top | GGTCGCCGCCCTTGGTTCCTTGACCCAACA |
| (SEQ ID No. 295) | CGTATGTACCAGGTTCCTGGAACTGGAATC |
| | TCTTTCCATAGAATGTTCTAAACCA |

### Reversing Causal Disease Mutations

[1107] The three genes in the Table below are synthesised with the pathogenic G>A mutation that introduces a pre-termination stop site into the gene and integrate them into a non-human cell line. The ability of Cas13b12-ADAR2 to correct the transcripts by changing the stop codon UAG to UIG (UGG) and thus restore protein translation is tested.

| Protein | | | |
|---|---|---|---|
| length (aa) | Full length candidates | Gene | Disease |
| 498 | NM 004992. 3 (MECP2): c. 311G > A | MECP2 | Rett syndrome |
| | (p.Trp104Ter) | | |
| 414 | NM 007375.3(TARDBP):c.943G > A | TARDBP | Amyotrophic lateral sclerosis |
| | (p.A1a315Thr) | | type 10 |
| 393 | NM 000546.5(TP53):c.273G > A | TP53 | Li-Fraumeni syndrome\|Hereditary |
| | (p.Trp91Ter) | | cancer-predisposing syndrome |

[1108] Forty-eight more pathogenic G>A mutations are shown in Table 5 below along with the accompanying disease. 200 bp fragments around these mutations are synthesised, rather than the entire gene, and cloned in front of a GFP. When the pre-termination site is restored, that will allow translation of the GFP and correction can be measured by fluorescence in high-throughput—in addition to RNA sequencing.

TABLE 5

| | Candidate | Gene | Disease |
|---|---|---|---|
| 1 | NM_004006.2(DMD):c.3747G > A | DMD | Duchenne muscular dystrophy |
| | (p.Trp1249Ter) | | |
| 2 | M_000344.3(SMN1):c.305G > A | SMN1 | Spinal muscular atrophy, type II\|Kugelberg- |
| | (p.Trp102Ter) | | Welander disease |
| 3 | NM_000492.3(CFTR):c.3846G > A | CFTR | Cystic fibrosis\|Pereditary pancreatitis\|not |
| | (p.Trp1282Ter) | | provided\|ataluren response- Efficacy |
| 4 | NM_004562.2(PRKN):c.1358G > A | PRKN | Parkinson disease 2 |
| | (p.Trp453Ter) | | |
| 5 | NM_017651.4(AHI1):c.2174G > A | AHI1 | Joubert syndrome 3 |
| | (p.Trp725Ter) | | |
| 6 | NM_000238.3(KCNH2):c.3002G > A | KCNH2 | Long QT syndromelnot |
| | (p.Trp1001Ter) | | provided |
| 7 | NM_000136.2(FANCC):c.1517G > A | FANCC1C9orf3 | Fanconi anemia, |
| | (p.Trp506Ter) | | complementation group C |
| 8 | NM_001009944.2(PKD1):c.12420G > A | PKD1 | Polycystic kidney disease, |
| | (p.Trp4140Ter) | | adult type |
| 9 | NM _77965.3(C8orf37):c.555G > A | C8orf37 | Retinitis pigmentosa 64 |
| | (p.Trp185Ter) | | |
| 10 | NM_000833.4(GRIN2A):c.3813G > A | GRIN2A | Epilepsy, focal, with speech disorder and |
| | (p.Trp1271Ter) | | with or without mental retardation |
| 11 | NM_000548.4(TSC2):c.2108G > A | TSC2 | Tuberous sclerosis 2\|Tuberous sclerosis |
| | (p.Trp703Ter) | | syndrome |
| 12 | NM_000267.3(NF1):c.7044G > A | NF1 | Neurofibromatosis, type 1 |
| | (p.Trp2348Ter) | | |
| 13 | NM_000520.5(HEXA):c.1454G > A | HEXA | Tay-Sachs disease |
| | p.Trp485Ter) | | |
| 14 | NM_130838.1(UBE3A):c.2304G > A | UBE3A | Angelman syndrome |
| | (p.Trp768Ter) | | |
| 15 | NM_000543.4(SMPD1):c.168G > A | SMPD1 | Niemann-Pick disease, |
| | (p.Trp56Ter) | | type A |
| 16 | NM_000218. 2(KCNQ1): c.1175G > A | KCNQ1 | Long QT syndrome |
| | (p.Trp392Ter) | | |
| 17 | NM_000256.3(MYBPC3):c.3293G > A | MYBPC3 | Primary familial hypertrophic |
| | (p.Trp1098Ter) | | cardiomyopathy |
| 18 | NM_000038.5(APC):c.1262G > A | APC | Familial adenomatous |
| | (p.Trp421Ter) | | polyposis 1 |
| 19 | NM_000249.3(MLH1):c.1998G > A | MLH1 | Lynch syndrome |
| | (p.Trp666Ter) | | |
| 20 | NM_000054.4(AVPR2):c.878G > A | AVPR2 | Nephrogenic diabetes |
| | (p.Trp293Ter) | | insipidus, X-linked |
| 21 | NM_001204.6(BMPR2):c.893G > A | BMPR2 | Primary pulmonary |
| | (p.W298*) | | hypertension |
| 22 | NM_004560.3(ROR2):c.2247G > A | ROR2 | Brachydactyly type B1 |
| | (p.Trp749Ter) | | |
| 23 | NM_000518.4(RBB):c.114G > A | HBB | beta^{∧}0^{∧} Thalassemia\|beta |
| | (p.Trp38Ter) | | Thalassemia |
| 24 | NM_024577.3(SH3TC2):c.920G > A | SH3TC2 | Charcot-Marie-Tooth |
| | (p.Trp307Ter) | | disease, type 4C |
| 25 | NM_206933.2(USH2A):c.9390G > A | USH2A | Usher syndrome, type 2A |
| | (p.Trp3130Ter) | | |
| 26 | NM_000179.2(MSH6):c.3020G > A | MSH6 | Lynch syndrome |
| | (p.Trp1007Ter) | | |
| 27 | NM_002977.3(SCN9A):c.2691G > A | SCN9A\|OC101929 | Indifference to pain, congenital, |
| | (p.Trp897Ter) | 680 | autosomal recessive |
| 28 | NM_000090.3(COL3A1):c.30G > A | COL3A1 | Ehlers-Danlos syndrome, |
| | (p.Trp10Ter) | | type 4 |
| 29 | NM_000551.3(VHL):c.263G > A | VHL | Von Hippel-Lindau |
| | (p.Trp88Ter) | | syndrome\|not provided |
| 30 | NM_015627.2(LDLRAP1):c.65G > A | LDLRAP1 | Hypercholesterolemia, |
| | (p.Trp22Ter) | | autosomal recessive |
| 31 | NM_000132.3(F8):c.3144G > A | F8 | Hereditary factor VIII |
| | (p.Trp1048Ter) | | deficiency disease |
| 32 | NM_002185.4(IL7R):c.651G > A | IL7R | Severe combined immunodeficiency, |
| | (p.Trp217Ter) | | autosomal recessive, T cell-negative, |
| | | | B cell-positive, NK cell-positive |
| 33 | NM_000527.4(LDLR):c.1449G > A | LDLR | Familial |
| | (p.Trp483Ter) | | hypercholesterolemia |
| 34 | NM_002294.2(LAMP2):c.962G > A | LAMP2 | Danon disease |
| | (p.Trp321Ter) | | |
| 35 | NM_000271.4(NPC1):c.1142G > A | NPC1 | Niemann-Pick disease |
| | (p.Trp381Ter) | | type C1 |
| 36 | NM_000267.3(NF1):c.1713G > A | NF1 | Neurofibromatosis, type 1 |
| | (p.Trp571Ter) | | |
| 37 | NM_000035.3(ALDOB):c.888G > A | ALDOB | Hereditary fructosuria |
| | (p.Trp296Ter) | | |
| 38 | NM_000090.3(COL3A1):c.3833G > A | COL3A1 | Ehlers-Danlos syndrome, |
| | (p.Trp1278Ter) | | type 4 |
| 39 | NM 001369.2(DNAH5):c.8465G > A | DNAH5 | Primary ciliary dyskinesia |
| | p.Trp2822Ter) | | |
| 40 | NM_178443.2(FERMT3):c.48G > A | FERMT3 | Leukocyte adhesion |
| | (p.Trp16Ter) | | deficiency, type III |
| 41 | NM_005359.5(SMAD4):c.906G > A | SMAD4 | Juvenile polyposis |
| | (p.Trp302Ter) | | syndrome |
| 42 | NM_032119.3(ADGRV1):c.7406G > A | ADGRV1 | Usher syndrome, type 2C |
| | (p.Trp2469Ter) | | |
| 43 | NM_000206. 2(IL2RG):c.710G > A | IL2RG | X-linked severe combined |
| | (p.Trp237Ter) | | immunodeficiency |
| 44 | NM_007294.3(BRCA1):c.5511G > A | BRCA1 | Familial cancer of breast\|Breast-ovarian |
| | (p.Trp1837Ter) | | cancer, familial 1 |
| 45 | NM_130799.2(MEN1):c.1269G > A | MEN1 | Hereditary cancer- |
| | (p.Trp423Ter) | | predisposing syndrome |
| 46 | NM_000071.2(CBS):c.162G > A | CBS | Homocystinuria due to |
| | (p.Trp54Ter) | | CBS deficiency |
| 47 | NM_000059.3(BRCA2):c.582G > A | BRCA2 | Familial cancer of breast\|Breast-ovarian |
| | (p.Trp194Ter) | | cancer, familial 2 |
| 48 | NM_000053.3(ATP7B):c.2336G > A | ATP7B | Wilson disease |
| | (p.Trp779Ter) | | |

### Example 3

[1109] Efficient and precise nucleic acid editing holds great promise for treating genetic disease, particularly at the level of RNA, where disease-relevant transcripts can be rescued to yield functional protein products. Type VI CRISPR-Cas systems contain the programmable single-effector RNA-guided RNases Cas13. Here, we profile the diversity of Type VI systems to engineer a Cas13 ortholog capable of robust knockdown and demonstrate RNA editing by using catalytically-inactive Cas13 (dCas13) to direct adenosine deaminase activity to transcripts in mammalian cells. By fusing the ADAR2 deaminase domain to dCas13 and engineering guide RNAs to create an optimal RNA duplex substrate, we achieve targeted editing of specific single adenosines to inosines (which is read out as guanosine during translation) with efficiencies routinely ranging from 20-40% and up to 89%. This system, referred to as RNA Editing for Programmable A to I Replacement (REPAIR), can be further engineered to achieve high specificity. An engineered variant, REPAIRv2, displays greater than 170-fold increase in specificity while maintaining robust on-target A to I editing as well as minimize the system to ease viral delivery. We use REPAIRv2 to edit full-length transcripts containing known pathogenic mutations and create functional truncated versions suitable for packaging in adeno-associated viral (AAV) vectors. REPAIR presents a promising RNA editing platform with broad applicability for research, therapeutics, and biotechnology. Precise nucleic acid editing technologies are valuable for studying cellular function and as novel therapeutics. Although current editing tools, such as the Cas9 nuclease, can achieve programmable modification of genomic loci, edits are often heterogenous due to insertions or deletions or require a donor template for precise editing. Base editors, such as dCas9-APOBEC fusions, allow for editing without generating a double stranded break, but may lack precision due to the nature of cytidine deaminase activity, which edits any cytidine in a target window. Furthermore, the requirement for a protospacer adjacent motif (PAM) limits the number of possible editing sites. Here, we describe the development of a precise and flexible RNA base editing tool using the RNA-guided RNA targeting Cas13 enzyme from type VI prokaryotic clustered regularly interspaced short palindromic repeats (CRISPR) adaptive immune system.

[1110] Precise nucleic acid editing technologies are valuable for studying cellular function and as novel therapeutics. Current editing tools, based on programmable nucleases such as the prokaryotic clustered regularly interspaced short palindromic repeats (CRISPR)-associated nucleases Cas9 (1-4) or Cpf1(5), have been widely adopted for mediating targeted DNA cleavage which in turn drives targeted gene disruption through non-homologous end joining (NHEJ) or precise gene editing through template-dependent homology-directed repair (HDR)(6). NHEJ utilizes host machineries that are active in both dividing and post-mitotic cells and provides efficient gene disruption by generating a mixture of insertion or deletion (indel) mutations that can lead to frame shifts in protein coding genes. HDR, in contrast, is mediated by host machineries whose expression is largely limited to replicating cells. As such, the development of gene-editing capabilities in post-mitotic cells remains a major challenge. Recently, DNA base editors, such as the use of catalytically inactive Cas9 (dCas9) to target cytidine deaminase activity to specific genome targets to effect cytosine to thymine conversions within a target window, allow for editing without generating a DNA double strand break and significantly reduces the formation of indels(7, 8). However the targeting range of DNA base editors is limited due to the requirement of Cas9 for a protospacer adjacent motif (PAM) at the editing site(9). Here, we describe the development of a precise and flexible RNA base editing technology using the type VI CRISPR-associated RNA-guided RNase Cas13(10-13).

[1111] Cas13 enzymes have two Higher Eukaryotes and Prokaryotes Nucleotide-binding (HEPN) endoRNase domains that mediate precise RNA cleavage(10, 11). Three Cas13 protein families have been identified to date: Cas13a (previously known as C2c2), Cas13b, and Cas13c(12, 13). We recently reported Cas13a enzymes can be adapted as tools for nucleic acid detection(14) as well as mammalian and plant cell RNA knockdown and transcript tracking(15). The RNA-guided nature of Cas13 enzymes makes them attractive tool for RNA binding and perturbation applications.

[1112] The adenosine deaminase acting on RNA (ADAR) family of enzymes mediates endogenous editing of transcripts via hydrolytic deamination of adenosine to inosine, a nucleobase that is functionally equivalent to guanosine in translation and splicing(16). There are two functional human ADAR orthologs, ADAR1 and ADAR2, which consist of N-terminal double stranded RNA-binding domains and a C-terminal catalytic deamination domain. Endogenous target sites of ADAR1 and ADAR2 contain substantial double stranded identity, and the catalytic domains require duplexed regions for efficient editing in vitro and in vivo (18,19). Importantly, the ADAR catalytic domain is capable of deaminating target adenosines without any protein co-factors in vitro (20). ADAR1 has been found to target mainly repetitive regions whereas ADAR2 mainly targets non-repetitive coding regions (17). Although ADAR proteins have preferred motifs for editing that could restrict the potential flexibility of targeting, hyperactive mutants, such as ADAR(E488Q)(21), relax sequence constraints and improve adenosine to inosine editing rates. ADARs preferentially deaminate adenosines opposite cytidine bases in RNA duplexes(22), providing a promising opportunity for precise base editing. Although previous approaches have engineered targeted ADAR fusions via RNA guides (23-26), the specificity of these approaches has not been reported and their respective targeting mechanisms rely on RNA-RNA hybridization without the assistance of protein partners that may enhance target recognition and stringency.

[1113] Here we assay the entire family of Cas13 enzymes for RNA knockdown activity in mammalian cells and identify the Cas13b ortholog from Prevotella sp. P5-125 (PspCas13b) as the most efficient and specific for mammalian cell applications. We then fuse the ADAR2 deaminase domain (ADARDD) to catalytically inactive PspCas13b and demonstrate RNA editing for programmable A to I (G) replacement (REPAIR) of reporter and endogenous transcripts as well as disease-relevant mutations. Lastly, we employ a rational mutagenesis scheme to improve the specificity of dCas13b-ADAR2DD fusions to generate REPAIRv2 with more than 170 fold increase in specificity.

[1114] Methods

[1115] Design and Cloning of Bacterial Constructs

[1116] Mammalian codon optimized Cas13b constructs were cloned into the chloramphenicol resistant pACYC184 vector under control of the Lac promoter. Two corresponding direct-repeat (DR) sequences separated by BsaI restriction sites were then inserted downstream of Cas13b, under control of the pJ23119 promoter. Last, oligos for targeting spacers were phosphorylated using T4 PNK (New England Biolabs), annealed and ligated into BsaI digested vectors using T7 ligase (Enzymatics) to generate targeting Cas13b vectors. Guide sequences used are in Table 11.

[1117] Bacterial PFS Screens

[1118] Ampicillin resistance plasmids for PFS screens were cloned by inserting PCR products containing Cas13b targets with 2 5′ randomized nucleotides and 4 3′ randomized nucleotides separated by a target site immediately downstream of the start codon of the ampicillin resistance gene bla using NEB Gibson Assembly (New England Biolabs). 100 ng of ampicillin-resistant target plasmids were then electroporated with 65-100 ng chloramphenicol-resistant Cas13b bacterial targeting plasmids into Endura Electrocompetent Cells. Plasmids were added to cells, incubated 15 minutes on ice, electroporated using the manufacturer's protocol, and then 950 uL of recovery media was added to cells before a one hour outgrowth at 37C. The outgrowth was plated onto chloramphenicol and ampicillin double selection plates. Serial dilutions of the outgrowth were used to estimate the cfu/ng DNA. 16 hours post plating, cells were scraped off plates and surviving plasmid DNA harvested using the Qiagen Plasmid Plus Maxi Kit (Qiagen). Surviving Cas13b target sequences and their flanking regions were amplified by PCR and sequenced using an Illumina NextSeq. To assess PFS preferences, the positions containing randomized nucleotides in the original library were extracted, and sequences depleted relative to the vector only condition that were present in both bioreplicates were extracted using custom python scripts. The −log 2 of the ratio of PFS abundance in the Cas13b condition compared to the vector only control was then used to calculate preferred motifs. Specifically, all sequences having −log 2(sample/vector) depletion ratios above a specific threshold were used to generate weblogos of sequence motifs (weblogo.berkeley.edu). The specific depletion ratio values used to generate weblogos for each Cas13b ortholog are listed in Table 9.

[1119] Design and Cloning of Mammalian Constructs for RNA Interference

[1120] To generate vectors for testing Cas13 orthologs in mammalian cells, mammalian codon optimized Cas13a, Cas13b, and Cas13c genes were PCR amplified and golden-gate cloned into a mammalian expression vector containing dual NLS sequences and a C-terminal msfGFP, under control of the EFlalpha promoter. For further optimization Cas13 orthologs were golden gate cloned into destination vectors containing different C-terminal localization tags under control of the EF alpha promoter.

[1121] The dual luciferase reporter was cloned by PCR amplifying Gaussia and Cypridinia luciferase coding DNA, the EFlalpha and CMV promoters and assembly using the NEB Gibson Assembly (New England Biolabs).

[1122] For expression of mammalian guide RNA for Cas13a, Cas13b, or Cas13c orthologs, the corresponding direct repeat sequences were synthesized with golden-gate acceptor sites and cloned under U6 expression via restriction digest cloning. Individual guides were then cloned into the corresponding expression backbones for each ortholog by golden gate cloning. All Cas13 plasmids are listed in Table 10. All Cas13 guide sequences for knockdown experiments are listed in Tables 11-13.

[1123] Measurement of Cas13 Expression in Mammalian Cells

[1124] Dual-NLS Cas13-msfGFP constructs were transfected into HEK293FT cells with targeting and non-targeting guides. GFP fluorescence was measured 48 hours post transfection in the non-targeting guide condition using a plate reader.

[1125] Cloning of Pooled Mismatch Libraries for Cas13 Interference Specificity

[1126] Pooled mismatch library target sites were created by PCR. Oligos containing semi-degenerate target sequences in G-luciferase containing a mixture of 94% of the correct base and 2% of each incorrect base at each position within the target were used as one primer, and an oligo corresponding to a non-targeted region of G-luciferase was used as the second primer in the PCR reaction. The mismatch library target was then cloned into the dual luciferase reporter in place of the wildtype G-luciferase using NEB Gibson assembly (New England Biolabs).

[1127] Design and Cloning of Mammalian Constructs for RNA Editing

[1128] PspCas13b was made catalytically inactive (dPspCas13b) via two histidine to alanine mutations (H133A/H1058A) at the catalytic site of the HEPN domains. The deaminase domains of human ADAR1 and ADAR2 were synthesized and PCR amplified for gibson cloning into pcDNA-CMV vector backbones and were fused to dPspCas13b at the C-terminus via GS or GSGGGGS (SEQ ID No. 296) linkers. For the experiment in which we tested different linkers we cloned the following additional linkers between dPspCas13b and ADAR2dd: GGGGSGGGGSGGGGS, EAAAK (SEQ ID No. 297), GGSGGSGGSGGSGGSGGS (SEQ ID No. 298), and SGSETPGTSESATPES (SEQ ID No.

[1129] 299)(XTEN). Specificity mutants were generated by gibson cloning the appropriate mutants into the dPspCas13b-GSGGGGS backbone.

[1130] The luciferase reporter vector for measuring RNA editing activity was generated by creating a W85X mutation (TGG>TAG) in the luciferase reporter vector used for knockdown experiments. This reporter vector expresses functional Gluc as a normalization control, but a defective Cluc due to the addition of a pretermination site. To test ADAR editing motif preferences, we cloned every possible motif around the adenosine at codon 85 (XAX) of Cluc. All plasmids are listed in Table 10.

[1131] For testing PFS preference of REPAIR, we cloned a pooled plasmid library containing a 6 basepair degenerate PFS sequence upstream of a target region and adenosine editing site. The library was synthesized as an ultramer from Integrated DNA Technologies (IDT) and was made double stranded via annealing a primer and Klenow fragment of DNA polymerase I (New England Biolabs) fill in of the sequence. This dsDNA fragment containing the degenerate sequence was then gibson cloned into the digested reporter vector and this was then isopropanol precipitated and purified. The cloned library was then electroporated into Endura competent E. coli cells (Lucigen) and plated on 245 mm×245 mm square bioassay plates (Nunc). After 16 hours, colonies were harvested and midiprepped using endotoxin-free MACHEREY-NAGEL midiprep kits. Cloned libraries were verified by next generation sequencing.

[1132] For cloning disease-relevant mutations for testing REPAIR activity, 34 G>A mutations related to disease pathogenesis as defined in ClinVar were selected and 200 bp regions surrounding these mutations were golden gate cloned between mScarlett and EGFP under a CMV promoter. Two additional G>A mutations in AVPR2 and FANCC were selected for Gibson cloning the whole gene sequence under expression of EFlalpha.

[1133] For expression of mammalian guide RNA for REPAIR, the PspCas13b direct repeat sequences were synthesized with golden-gate acceptor sites and cloned under U6 expression via restriction digest cloning. Individual guides were then cloned into this expression backbones by golden gate cloning. Guide sequences for REPAIR experiments are listed in Table 14.

[1134] Mammalian Cell Culture

[1135] Mammalian cell culture experiments were performed in the HEK293FT line (American Type Culture Collection (ATCC)), which was grown in Dulbecco's Modified Eagle Medium with high glucose, sodium pyruvate, and GlutaMAX (Thermo Fisher Scientific), additionally supplemented with 1× penicillin-streptomycin (Thermo Fisher Scientific) and 10% fetal bovine serum (VWR Seradigm). Cells were maintained at confluency below 80%.

[1136] Unless otherwise noted, all transfections were performed with Lipofectamine 2000 (Thermo Fisher Scientific) in 96-well plates coated with poly-D-lysine (BD Biocoat). Cells were plated at approximately 20,000 cells/well sixteen hours prior to transfection to ensure 90% confluency at the time of transfection. For each well on the plate, transfection plasmids were combined with Opti-MEM I Reduced Serum Medium (Thermo Fisher) to a total of 25 1. Separately, 24.5 ul of Opti-MEM was combined with 0.5 ul of Lipofectamine 2000. Plasmid and Lipofectamine solutions were then combined and incubated for 5 minutes, after which they were pipetted onto cells. The U20S transfections were performed using Lipofectamine 3000 according to the manufacturer's protocol.

[1137] RNA Knockdown Mammalian Cell Assays

[1138] To assess RNA targeting in mammalian cells with reporter constructs, 150 ng of Cas13 construct was co-transfected with 300 ng of guide expression plasmid and 12.5 ng of the knockdown reporter construct. 48 hours post-transfection, media containing secreted luciferase was removed from cells, diluted 1:5 in PBS, and measured for activity with BioLux Cypridinia and Biolux Gaussia luciferase assay kits (New England Biolabs) on a plate reader (Biotek Synergy Neo2) with an injection protocol. All replicates performed are biological replicates.

[1139] For targeting of endogenous genes, 150 ng of Cas13 construct was co-transfected with 300 ng of guide expression plasmid. 48 hours post-transfection, cells were lysed and RNA was harvested and reverse transcribed using a previously described (33) modification of the Cells-to-Ct kit (Thermo Fisher Scientific). cDNA expression was measured via qPCR using TaqMan qPCR probes for the KRAS transcript (Thermo Fisher Scientific), GAPDH control probes (Thermo Fisher Scientific), and Fast Advanced Master Mix (Thermo Fisher Scientific). qPCR reactions were read out on a LightCycler 480 Instrument II (Roche), with four 5 ul technical replicates in 384-well format.

[1140] Evaluation of RNA Specificity Using Pooled Library of Mismatched Targets

[1141] The ability of Cas13 to interfere with the mismatched target library was tested using HEK293FT cells seeded in 6 well plates. 70% confluent cells were transfected using 2400 ng Cas13 vector, 4800 ng of guide and 240 ng of mismatched target library. 48 hours post transfection, cells were harvested and RNA extracted using the QIAshredder (Qiagen) and the Qiagen RNeasy Mini Kit. lug of extracted RNA was reverse transcribed using the qScript Flex cDNA synthesis kit (Quantabio) following the manufacturer's gene-specific priming protocol and a Gluc specific RT primer. cDNA was then amplified and sequenced on an Illumina NextSeq.

[1142] The sequencing was analyzed by counting reads per sequence and depletion scores were calculated by determining the log 2(-read count ratio) value, where read count ratio is the ratio of read counts in the targeting guide condition versus the non-targeting guide condition. This score value represents the level of Cas13 activity on the sequence, with higher values representing stronger depletion and thus higher Cas13 cleavage activity. Separate distributions for the single mismatch and double mismatch sequences were determined and plotted as heatmaps with a depletion score for each mismatch identity. For double mismatch sequences the average of all possible double mismatches at a given position were plotted.

[1143] Transcriptome-Wide Profiling of Cas13 in Mammalian Cells by RNA Sequencing

[1144] For measurement of transcriptome-wide specificity, 150 ng of Cas13 construct, 300 ng of guide expression plasmid and 15 ng of the knockdown reporter construct were co-transfected; for shRNA conditions, 300 ng of shRNA targeting plasmid, 15 ng of the knockdown reporter construct, and 150 ng of EF1-alpha driven mCherry (to balance reporter load) were co-transfected. 48 hours after transfection, RNA was purified with the RNeasy Plus Mini kit (Qiagen), mRNA was selected for using NEBNext Poly(A) mRNA Magnetic Isolation Module (New England Biolabs) and prepared for sequencing with the NEBNext Ultra RNA Library Prep Kit for Illumina (New England Biolabs). RNA sequencing libraries were then sequenced on a NextSeq (Illumina).

[1145] To analyze transcriptome-wide sequencing data, reads were aligned RefSeq GRCh38 assembly using Bowtie and RSEM version 1.2.31 with default parameters (34): accurate transcript quantification from RNA-Seq data with or without a reference genome]. Transcript expression was quantified as log 2(TPM+1), genes were filtered for log 2(TPM+1)>2.5 For selection of differentially expressed genes, only genes with differential changes of >2 or <0.75 were considered. Statistical significance of differential expression was evaluated Student's T-test on three targeting replicates versus non-targeting replicates, and filtered for a false discovery rate of <0.01% by Benjamini-Hochberg procedure.

[1146] ADAR RNA Editing in Mammalian Cells Transfections

[1147] To assess REPAIR activity in mammalian cells, we transfected 150 ng of REPAIR vector, 300 ng of guide expression plasmid, and 40 ng of the RNA editing reporter. After 48 hours, RNA from cells were harvested and reverse transcribed using a method previously described (33) with a gene specific reverse transcription primer. The extracted cDNA was then subjected to two rounds of PCR to add Illumina adaptors and sample barcodes using NEBNext High-Fidelity 2×PCR Master Mix (New England Biolabs). The library was then subjected to next generation sequencing on an Illumina NextSeq or MiSeq. RNA editing rates were then evaluated at all adenosine within the sequencing window.

[1148] In experiments where the luciferase reporter was targeted for RNA editing, we also harvested the media with secreted luciferase prior to RNA harvest. In this case, because the corrected Cluc might be at low levels, we did not dilute the media. We measured luciferase activity with BioLux Cypridinia and Biolux Gaussia luciferase assay kits (New England Biolabs) on a plate reader (Biotek Synergy Neo2) with an injection protocol. All replicates performed are biological replicates.

[1149] PFS Binding Mammalian Screen

[1150] To determine the contribution of the PFS to editing efficiency, 625 ng of PFS target library, 4.7 ug of guide, and 2.35 ug of REPAIR were co-transfected on HEK293FT cells plated in 225 cm2 flasks. Plasmids were mixed with 33 ul of PLUS reagent (Thermo Fisher Scientific), brought to 533 ul with Opti-MEM, incubated for 5 minutes, combined with 30 ul of Lipofectamine 2000 and 500 ul of Opti-MEM, incubated for an additional 5 minutes, and then pipetted onto cells. 48 hours post-transfection, RNA was harvested with the RNeasy Plus Mini kit (Qiagen), reverse transcribed with qScript Flex (Quantabio) using a gene specific primer, and amplified with two rounds of PCR using NEBNext High-Fidelity 2×PCR Master Mix (New England Biolabs) to add Illumina adaptors and sample barcodes. The library was sequenced on an Illumina NextSeq, and RNA editing rates at the target adenosine were mapped to PFS identity. To increase coverage, the PFS was computationally collapsed to 4 nucleotides. REPAIR editing rates were calculated for each PFS, averaged over biological replicates with non-targeting rates for the corresponding PFS subtracted.

### Whole-Transcriptome Sequencing to Evaluate ADAR Editing Specificity

[1151] For analyzing off-target RNA editing sites across the transcriptome, we harvested total RNA from cells 48 hours post transfection using the RNeasy Plus Miniprep kit (Qiagen). The mRNA fraction is then enriched using a NEBNext Poly(A) mRNA Magnetic Isolation Module (NEB) and this RNA is then prepared for sequencing using NEBNext Ultra RNA Library Prep Kit for Illumina (NEB). The libraries were then sequenced on an Illumina NextSeq and loaded such that there was at least 5 million reads per sample.

### RNA Editing Analysis for Targeted and Transcriptome Wide Experiments

[1152] Analysis of the transcriptome-wide editing RNA sequencing data was performed on the FireCloud computational framework (https://software.broadinstitute.org/firecloud/) using a custom workflow we developed: https://portal.firecloud.org/#methods/m/rna_editing_final_workflow/rna_editing_final_workf low/1. For analysis, unless otherwise denoted, sequence files were randomly downsampled to 5 million reads. An index was generated using the RefSeq GRCh38 assembly with Gluc and Cluc sequences added and reads were aligned and quantified using Bowtie/RSEM version 1.3.0. Alignment BAMs were then sorted and analyzed for RNA editing sites using REDitools (35,36) with the following parameters: -t8-e-d-1-U [AG or TC]-p-u-m20-T6-0-W-v1-n 0.0. Any significant edits found in untransfected or EGFP-transfected conditions were considered to be SNPs or artifacts of the transfection and filtered out from the analysis of off-targets. Off-targets were considered significant if the Fisher's exact test yielded a p-value less than 0.05 after multiple hypothesis correction by Benjamini Hochberg correction and at least 2 of 3 biological replicates identified the edit site. Overlap of edits between samples was calculated relative to the maximum possible overlap, equivalent to the fewer number of edits between the two samples. The percentage of overlapping edit sites was calculated as the number of shared edit sites divided by minimum number of edits of the two samples, multiplied by 100. For the high-coverage sequencing analysis, an additional layer of filtering for known SNP positions was performed using the Kaviar (37) method for identifying SNPs.

[1153] For analyzing the predicted variant effects of each off-target, the list of off-target edit sites was analyzed using the variant annotation integrator (https://genome.ucsc.edu/cgi-bin/hgVai) as part of the UCSC genome browser suite of tools using the SIFT and PolyPhen-2 annotations. To declare whether the off-target genes are oncogenic, a database of oncogenic annotations from the COSMIC catalogue of somatic mutations in cancer (cancer.sanger.ac.uk).

[1154] For analyzing whether the REPAIR constructs perturbed RNA levels, the transcript per million (TPM) values output from the RSEM analysis were used for expression counts and transformed to log-space by taking the log 2(TPM+1). To find differentially regulated genes, a Student's t-test was performed on three targeting guide replicates versus three non-targeting guide replicates. The statistical analysis was only performed on genes with log 2(TPM+1) values greater than 2.5 and genes were only considered differentially regulated if they had a fold change greater than 2 or less than 0.8. Genes were reported if they had a false discovery rate of less than 0.01.

### Results

### Comprehensive Characterization of Cas13 Family Members in Mammalian Cells

[1155] We previously developed Lwa Cas13a for mammalian knockdown applications, but it required an msfGFP stabilization domain for efficient knockdown and, although the specificity was high, knockdown efficiencies were not consistently below 50%(15). We sought to identify a more robust RNA-targeting CRISPR system by characterizing a genetically diverse set of Cas13 family members to assess their RNA knockdown activity in mammalian cells (FIG. 49A). We cloned 21 Cas13a, 15 Cas13b, and 7 Cas13c mammalian codon-optimized orthologs (Table 6) into an expression vector with N- and C-terminal nuclear export signal (NES) sequences and a C-terminal msfGFP to enhance protein stability. To assay interference in mammalian cells, we designed a dual reporter construct expressing the orthogonal Gaussia (Gluc) and Cypridinia (Cluc) luciferases under separate promoters, which allows one luciferase to function as a measure of Cas13 interference activity and the other to serve as an internal control. For each ortholog, we designed PFS-compatible guide RNAs, using the Cas13b PFS motifs derived from an ampicillin interference assay (FIG. 55A-55C; Table 7) and the 3′ H PFS (not G) from previous reports of Cas13a activity(10).

[1156] We transfected HEK293FT cells with Cas13 expression, guide RNA and reporter plasmids and quantified levels of the targeted Gluc 48 hours later (FIGS. 49B, 69A). Testing two guide RNAs for each Cas13 ortholog revealed a range of activity levels, including five Cas13b orthologs with similar or increased interference across both guide RNAs relative to the recently characterized Lwa Cas13a (FIG. 49B), and we observed only a weak correlation between Cas13 expression and interference activity (FIGS. 69B-69D). We selected these five Cas13b orthologs, as well as the top two Cas13a orthologs for further engineering.

[1157] We next tested for Cas13-mediated knockdown of Gluc without msfGFP, in order to select orthologs that do not require stabilization domains for robust activity. We hypothesized that, in addition to msfGFP, Cas13 activity could be affected by subcellular localization, as previously reported for optimization of Lwa Cas13a(15). Therefore, we tested the interference activity of the seven selected Cas13 orthologs C-terminally fused to one of six different localization tags without msfGFP. Using the luciferase reporter assay, we found that PspCas13b and PguCas13b C-terminally fused to the HIV Rev gene NES and RanCas13b C-terminally fused to the MAPK NES had the highest levels of interference activity (FIG. 56A). To further distinguish activity levels of the top orthologs, we compared the three optimized Cas13b constructs to the optimal Lwa Cas13α-msfGFP fusion and shRNA for their ability to knockdown the KRAS transcript using position-matched guides (FIG. 56B). We observed the highest levels interference for PspCas13b (average knockdown 62.9%) and thus selected this for further comparison to Lwa Cas13a.

[1158] To more rigorously define the activity level of PspCas13b and Lwa Cas13a we designed position matched guides tiling along both Gluc and Cluc and assayed their activity using our luciferase reporter assay. We tested 93 and 20 position matched guides targeting Gluc and Cluc, respectively, and found that PspCas13b had consistently increased levels of knockdown relative to Lwa Cas13a (average of 92.3% for PspCas13b vs. 40.1% knockdown for Lwa Cas13a) (FIGS. 49C, 49D).

[1159] Specificity of Cas13 Mammalian Interference Activity

[1160] To characterize the interference specificities of PspCas13b and Lwa Cas13a we designed a plasmid library of luciferase targets containing single mismatches and double mismatches throughout the target sequence and the three flanking 5′ and 3′ base pairs (FIG. 56C). We transfected HEK293FT cells with either Lwa Cas13a or PspCas13b, a fixed guide RNA targeting the unmodified target sequence, and the mismatched target library corresponding to the appropriate system. We then performed targeted RNA sequencing of uncleaved transcripts to quantify depletion of mismatched target sequences. We found that Lwa Cas13α and PspCas13b had a central region that was relatively intolerant to single mismatches, extending from base pairs 12-26 for the PspCas13b target and 13-24 for the Lwa Cas13a target (FIG. 56D). Double mismatches were even less tolerated than single mutations, with little knockdown activity observed over a larger window, extending from base pairs 12-29 for PspCas13b and 8-27 for Lwa Cas13a in their respective targets (FIG. 56E). Additionally, because there are mismatches included in the three nucleotides flanking the 5′ and 3′ ends of the target sequence, we could assess PFS constraints on Cas13 knockdown activity. Sequencing showed that almost all PFS combinations allowed robust knockdown, indicating that a PFS constraint for interference in mammalian cells likely does not exist for either enzyme tested. These results indicate that Cas13α and Cas13b display similar sequence constraints and sensitivities against mismatches.

[1161] We next characterized the interference specificity of PspCas13b and Lwa Cas13a across the mRNA fraction of the transcriptome. We performed transcriptome-wide mRNA sequencing to detect significant differentially expressed genes. Lwa Cas13α and PspCas13b demonstrated robust knockdown of Gluc (FIGS. 49E, 49F) and were highly specific compared to a position-matched shRNA, which showed hundreds of off-targets (FIG. 49G), consistent with our previous characterization of Lwa Cas13a specificity in mammalian cells (15).

[1162] Cas13-ADAR Fusions Enable Targeted RNA Editing

[1163] Given that PspCas13b achieved consistent, robust, and specific knockdown of mRNA in mammalian cells, we envisioned that it could be adapted as an RNA binding platform to recruit the deaminase domain of ADARs (ADARDD) for programmable RNA editing. To engineer a PspCas13b lacking nuclease activity (dPspCas13b, referred to as dCas13b from here), we mutated conserved catalytic residues in the HEPN domains and observed loss of luciferase RNA knockdown activity (FIG. 57A). We hypothesized that a dCas13b-ADARDD fusion could be recruited by a guide RNA to target adenosines, with the hybridized RNA creating the required duplex substrate for ADAR activity (FIG. 50A). To enhance target adenosine deamination rates we introduced two additional modifications to our initial RNA editing design: we introduced a mismatched cytidine opposite the target adenosine, which has been previously reported to increase deamination frequency, and fused dCas13b with the deaminase domains of human ADAR1 or ADAR2 containing hyperactivating mutations to enhance catalytic activity (ADAR1DD(E1008Q)(27) or ADAR2DD(E488Q)(21)).

[1164] To test the activity of dCas13b-ADARDD we generated an RNA-editing reporter on Cluc by introducing a nonsense mutation (W85X (UGG->UAG)), which could functionally be repaired to the wildtype codon through A->I editing (FIG. 50B) and then be detected as restoration of Cluc luminescence. We evenly tiled guides with spacers 30, 50, 70 or 84 nucleotides in length across the target adenosine to determine the optimal guide placement and design (FIG. 50C). We found that dCas13b-ADAR1DD required longer guides to repair the Cluc reporter, while dCas13b-ADAR2DD was functional with all guide lengths tested (FIG. 50C). We also found that the hyperactive E488Q mutation improved editing efficiency, as luciferase restoration with the wildtype ADAR2DD was reduced (FIG. 57B). From this demonstration of activity, we chose dCas13b-ADAR2DD(E488Q) for further characterization and designated this approach as RNA Editing for Programmable A to I Replacement version 1 (REPAIRv1).

[1165] To validate that restoration of luciferase activity was due to bona fide editing events, we measured editing of Cluc transcripts subject to REPAIRv1 directly via reverse transcription and targeted next-generation sequencing. We tested 30- and 50-nt spacers around the target site and found that both guide lengths resulted in the expected A to I edit, with 50-nt spacers achieving higher editing percentages (FIGS. 50D, 50E, FIG. 57C). We also observed that 50-nt spacers had an increased propensity for editing at non-targeted adenosines, likely due to increased regions of duplex RNA (FIG. 50E, FIG. 57C).

[1166] We next targeted an endogenous gene, PPIB. We designed 50-nt spacers tiling PPIB and found that we could edit the PPIB transcript with up to 28% editing efficiency (FIG. 57D). To test if REPAIR could be further optimized, we modified the linker between dCas13b and ADAR2DD(E488Q) (FIG. 57E, Table 8) and found that linker choice modestly affected luciferase activity restoration. Additionally, we tested the ability of dCas13b and guide alone to mediate editing events, finding that the ADAR deaminase domain is required for editing (FIGS. 70A-70D).

[1167] Defining the Sequence Parameters for RNA Editing

[1168] Given that we could achieve precise RNA editing at a test site, we wanted to characterize the sequence constraints for programming the system against any RNA target in the transcriptome. Sequence constraints could arise from dCas13b targeting limitations, such as the PFS, or from ADAR sequence preferences(28). To investigate PFS constraints on REPAIRv1, we designed a plasmid library carrying a series of four randomized nucleotides at the 5′ end of a target site on the Clue transcript (FIG. 51A). We targeted the center adenosine within either a UAG or AAC motif and found that for both motifs, all PFSs demonstrated detectable levels of RNA editing, with a majority of the PFSs having greater than 50% editing at the target site (FIG. 51B). Next, we sought to determine if the ADAR2DD in REPAIRv1 had any sequence constraints immediately flanking the targeted base, as has been reported previously for ADAR2DD(28). We tested every possible combination of 5′ and 3′ flanking nucleotides directly surrounding the target adenosine (FIG. 51C), and found that REPAIRv1 was capable of editing all motifs (FIG. 51D). Lastly, we analyzed whether the identity of the base opposite the target A in the spacer sequence affected editing efficiency and found that an A-C mismatch had the highest luciferase restoration with A-G, A-U, and A-A having drastically reduced REPAIRv1 activity (FIGS. 57F, 70E).

[1169] Correction of Disease-Relevant Human Mutations Using REPAIRv1

[1170] To demonstrate the broad applicability of the REPAIRv1 system for RNA editing in mammalian cells, we designed REPAIRv1 guides against two disease relevant mutations: 878G>A (AVPR2 W293X) in X-linked Nephrogenic diabetes insipidus and 1517G>A (FANCC W506X) in Fanconi anemia. We transfected expression constructs for cDNA of genes carrying these mutations into HEK293FT cells and tested whether REPAIRv1 could correct the mutations. Using guide RNAs containing 50-nt spacers, we were able to achieve 35% correction of AVPR2 and 23% correction of FANCC (FIGS. 52A-52D). We then tested the ability of REPAIRv1 to correct 34 different disease-relevant G>A mutations (Table 9) and found that we were able to achieve significant editing at 33 sites with up to 28% editing efficiency (FIG. 52E). The mutations we chose are only a fraction of the pathogenic G to A mutations (5,739) in the ClinVar database, which also includes an additional 11,943 G to A variants (FIG. 52F and FIG. 58). Because there are no sequence constraints, REPAIRv1 is capable of potentially editing all these disease relevant mutations, especially given that we observed significant editing regardless of the target motif (FIG. 51C and FIG. 52G).

[1171] Delivering the REPAIRv1 system to diseased cells is a prerequisite for therapeutic use, and we therefore sought to design REPAIRv1 constructs that could be packaged into therapeutically relevant viral vectors, such as adeno-associated viral (AAV) vectors. AAV vectors have a packaging limit of 4.7 kb, which cannot accommodate the large size of dCas13b-ADARDD (4473 bp) along with promoter and expression regulatory elements. To reduce the size, we tested a variety of N-terminal and C-terminal truncations of dCas13 fused to ADAR2DD(E488Q) for RNA editing activity. We found that all C-terminal truncations tested were still functional and able to restore luciferase signal (FIG. 59), and the largest truncation, C-terminal Δ984-1090 (total size of the fusion protein 4,152 bp) was small enough to fit within the packaging limit of AAV vectors.

[1172] Transcriptome-Wide Specificity of REPAIRv1

[1173] Although RNA knockdown with PspCas13b was highly specific, in our luciferase tiling experiments, we observed off-target adenosine editing within the guide:target duplex (FIG. 50E). To see if this was a widespread phenomenon, we tiled an endogenous transcript, KRAS, and measured the degree of off-target editing near the target adenosine (FIG. 53A). We found that for KRAS, while the on-target editing rate was 23%, there were many sites around the target site that also had detectable A to G edits (FIG. 53B).

[1174] Because of the observed off-target editing within the guide:target duplex, we evaluated all possible transcriptome off-targets by performing RNA sequencing on all mRNAs. RNA sequencing revealed that there was a significant number A to G off-target events, with 1,732 off-targets in the targeting condition and 925 off-targets in the non-targeting condition, with 828 off-targets overlapping (FIGS. 53C, 53D). Of all the editing sites across the transcriptome, the on-target editing site had the highest editing rate, with 89% A to G conversion.

[1175] Given the high specificity of Cas13 targeting, we reasoned that the off-targets may arise from ADAR. We repeated the Cluc targeting experiment, this time comparing transcriptome changes for REPAIRv1 with a targeting guide, REPAIRv1 with a non-targeting guide, REPAIRv1 alone, or ADARDD(E488Q) alone (FIGS. 71A-71D). We found differentially expressed genes and off-target editing events in each condition (FIG. 71,C). Interestingly, there was a high degree of overlap in the off-target editing events between ADARDD(E488Q) and all REPAIRv1 off-target edits, supporting the hypothesis that REPAIR off-target edits are driven by dCas13b-independent ADARDD(E488Q) editing events (FIGS. 71A-71D).

[1176] Two RNA-guided ADAR systems have been described previously (FIG. 60A). The first utilizes a fusion of ADAR2DD to the small viral protein lambda N (kN), which binds to the BoxB-A RNA hairpin(22). A guide RNA with double BoxB-k hairpins guides ADAR2DD to edit sites encoded in the guide RNA(23). The second design utilizes full length ADAR2 (ADAR2) and a guide RNA with a hairpin that the double strand RNA binding domains (dsRBDs) of ADAR2 recognize(21, 24). We analyzed the editing efficiency of these two systems compared to REPAIRv1 and found that the BoxB-ADAR2 and ADAR2 systems demonstrated 63% and 36% editing rates, respectively, compared to the 89% editing rate achieved by REPAIRv1 (FIGS. 60B-60E). Additionally, the BoxB and ADAR2 systems created 2018 and 174 observed off targets, respectively, in the targeting guide conditions, compared to the 1,229 off targets in the REPAIRv1 targeting guide condition. Notably, all the conditions with the two ADAR2DD-based systems (REPAIRv1 and BoxB) showed a high percentage of overlap in their off-targets while the ADAR2 system had a largely distinct set of off-targets (FIG. 60F). The overlap in off-targets between the targeting and non-targeting conditions and between REPAIRv1 and BoxB conditions suggest ADAR2DD drove off-targets independent of dCas13 targeting (FIG. 60F).

[1177] Improving Specificity of REPAIRv1 Through Rational Protein Engineering

[1178] To improve the specificity of REPAIR, we employed structure-guided protein engineering of ADAR2DD(E488Q). Because of the guide-independent nature of off-targets, we hypothesized that destabilizing ADAR2DD(E488Q)-RNA binding would selectively decrease off-target editing, but maintain on-target editing due to increased local concentration from dCas13b tethering of ADAR2DD(E488Q) to the target site. We mutagenized ADAR2DD(E488Q) residues previously determined to contact the duplex region of the target RNA (FIG. 54A)(18) on the ADAR2DD(E488Q) background. To assess efficiency and specificity, we tested 17 single mutants with both targeting and non-targeting guides, under the assumption that background luciferase restoration in the non-targeting condition detected would be indicative of broader off-target activity. We found that mutations at the selected residues had significant effects on the luciferase activity for targeting and non-targeting guides (FIGS. 54A, 54B, FIG. 61A). A majority of mutants either significantly improved the luciferase activity for the targeting guide or increased the ratio of targeting to non-targeting guide activity, which we termed the specificity score (FIG. 54A, 54B). We selected a subset of these mutants (FIG. 54B) for transcriptome-wide specificity profiling by next generation sequencing. As expected, off-targets measured from transcriptome-wide sequencing correlated with our specificity score (FIG. 61B) for mutants. We found that with the exception of ADAR2DD(E488Q/R455E), all sequenced REPAIRv1 mutants could effectively edit the reporter transcript (FIG. 54C), with many mutants showing reduction in the number of off-targets (FIGS. 61C, 62A-62B). We further explored the surrounding motifs of off-targets for specificity mutants, and found that REPAIRv1 and most of the engineered mutants exhibited a strong 3′ G preference for their edits, in agreement with the characterized ADAR2 motif (FIG. 63A)(28). We selected the mutant ADAR2DD(E488Q/T375G) for future experiments, as it had the highest percent editing of the four mutants with the lowest numbers of transcriptome-wide off targets and termed it REPAIRv2. Compared to REPAIRv1, REPAIRv2 exhibited increased specificity, with a reduction from 18,385 to 20 transcriptome-wide off-targets by high-coverage sequencing (125× coverage, 10 ng DNA transfection) (FIG. 54D). In the region surrounding the targeted adenosine in Cluc, REPAIRv2 had reduced off-target editing, visible in sequencing traces (FIG. 54E). In motifs derived from next-generation sequencing, REPAIRv1 presented a strong preference towards 3′ G, but showed off-targeting edits for all motifs (FIG. 63B); by contrast, REPAIRv2 only edited the strongest off-target motifs (FIG. 63C). The distribution of edits on transcripts was heavily skewed, with highly-edited genes having over 60 edits (FIG. 64A, 64B), whereas REPAIRv2 only edited one transcript (EEF1Δ1) multiple times (FIGS. 64D-64F). REPAIRv1 off-target edits were predicted to result in numerous variants, including 1000 missense mutations (FIG. 64C) with 93 oncogenic events (FIG. 64D). In contrast, REPAIRv2 only had 6 missense mutations (FIG. 64E), none of which had oncogenic consequences (FIG. 64F). This reduction in predicted off-target effects distinguishes REPAIRv2 from other RNA editing approaches. Experiments with different dosages of guide RNA suggests that dose response may reduce off target activity (FIG. 68).

[1179] Analysis of the sequence surrounding off-target edits for REPAIRv1 or v2 did not reveal homology to guide sequences, suggesting that off-targets are likely dCas13b-independent (FIGS. 72A-72B), consistent with the high overlap of off-targets between REPAIRv1 and the ADAR deaminase domain (FIG. 71D). To directly compare REPAIRv2 against other programmable ADAR systems, we repeated our Cluc targeting experiments with all systems at two different dosages of ADAR vector, finding that REPAIRv2 had comparable on-target editing to BoxB and ADAR2 but with significantly fewer off-target editing events at both dosages (FIGS. 73A-73B). REPAIRv2 had enhanced specificity compared to REPAIRv1 at both dosages (FIG. 73B), a finding that also extended to two guides targeting distinct sites on PPIB (FIGS. 74A-74D). It is also worth noting that, in general, the lower dosage condition (10 ng) had fewer off-targets than the higher dosage condition (150 ng) (FIGS. 70A-70D).

[1180] To assess editing specificity with greater sensitivity, we sequenced the low dosage condition (10 ng of transfected DNA) of REPAIRv1 and v2 at significantly higher sequencing depth (125× coverage of the transcriptome). Increased numbers of off-targets were found at higher sequencing depths corresponding to detection of rarer off-target events (FIGS. 75A-75D). Furthermore, we speculated that different transcriptome states could also potentially alter the number of off-targeting events. Therefore, we tested REPAIRv2 activity in the osteosarcoma U2OS cell line, observing 6 and 7 off-targets for the targeting and non-targeting guide, respectively (FIGS. 76A-76D).

[1181] We targeted REPAIRv2 to endogenous genes to test if the specificity-enhancing mutations reduced nearby edits in target transcripts while maintaining high-efficiency on-target editing. For guides targeting either KRAS or PPIB, we found that REPAIRv2 had no detectable off-target edits, unlike REPAIRv1, and could effectively edit the on-target adenosine at 27.1% and 13%, respectively (FIGS. 54F, 54G). This specificity extended to additional target sites, including regions that demonstrate high-levels of background in non-targeting conditions for REPAIRv1, such as other KRAS or PPIB target sites (FIGS. 65A-65C). Overall, REPAIRv2 eliminated off-targets in duplexed regions around the edited adenosine and showed dramatically enhanced transcriptome-wide specificity.

### CONCLUSION

[1182] We have shown here that the RNA-guided RNA-targeting type VI-B effector Cas13b is capable of highly efficient and specific RNA knockdown, providing the basis for improved tools for interrogating essential genes and non-coding RNA as well as controlling cellular processes at the transcriptomic level. Catalytically inactive Cas13b (dCas13b) retains programmable RNA binding capability, which we leveraged here by fusing dCas13b to the adenosine deaminase ADAR2 to achieve precise A to I edits, a system we term REPAIRv1 (RNA Editing for Programmable A to I Replacement version 1). Further engineering of the system produced REPAIRv2, a method with comparable or increased activity relative to current editing platforms with dramatically improved specificity than previously described RNA editing platforms (25, 29) while maintaining high levels of on-target efficacy.

[1183] Although Cas13b exhibits high fidelity, our initial results with dCas13b-ADAR2DD fusions revealed thousands of off-targets. To address this, we employed a rational mutagenesis strategy to vary the ADAR2DD residues that contact the RNA duplex, identifying a variant, ADAR2DD(E488Q/T375G), capable of precise, efficient, and highly specific editing when fused to dCas13b. Editing efficiency with this variant was comparable to or better than that achieved with two currently available systems, BoxB-ADARDD or ADAR2 editing. Moreover, the REPAIRv2 system created only 10 observable off-targets in the whole transcriptome, at least an order of magnitude better than both alternative editing technologies. While it is possible that ADAR could deaminate adenosine bases on the DNA strand in RNA-DNA heteroduplexes (20), it is unlikely to do so in this case as Cas13b does not bind DNA efficiently and that REPAIR is cytoplasmically localized. Additionally, the lack of homology of off-target sites to the guide sequence and the strong overlap of off-targets with the ADARDD(E488Q)-only condition suggest that off-targets are not mediated by off-target guide binding. Deeper sequencing and novel inosine enrichment methods could further refine our understanding of REPAIR specificity.

[1184] The REPAIR system offers many advantages compared to other nucleic acid editing tools. First, the exact target site can be encoded in the guide by placing a cytidine within the guide extension across from the desired adenosine to create a favorable A-C mismatch ideal for ADAR editing activity. Second, Cas13 has no targeting sequence constraints, such as a PFS or PAM, and no motif preference surrounding the target adenosine, allowing any adenosine in the transcriptome to be potentially targeted with the REPAIR system. We do note, however, that DNA base editors can target either the sense or anti-sense strand, while the REPAIR system is limited to transcribed sequences, thereby constraining the total number of possible editing sites we could target. However, due to the more flexible nature of targeting with REPAIR, this system can effect more edits within ClinVar (FIG. 52C) than Cas9-DNA base editors. Third, the REPAIR system directly deaminates target adenosines to inosines and does not rely on endogenous repair pathways, such as base-excision or mismatch repair, to generate desired editing outcomes. Thus, REPAIR should be possible in non-dividing cells that cannot support other forms of editing, such as in post-mitotic cells, such as in neurons. Fourth, RNA editing can be transient, allowing the potential for temporal control over editing outcomes. This property will likely be useful for treating diseases caused by temporary changes in cell state, such as local inflammation.

[1185] The REPAIR system provides multiple opportunities for additional engineering. Cas13b possesses pre-crRNA processing activity(13), allowing for multiplex editing of multiple variants, which alone might not alter disease risk, but together might have additive effects and disease-modifying potential. Extension of our rational design approach, such as combining promising mutations, could further increase the specificity and efficiency of the system, while unbiased screening approaches could identify additional residues for improving REPAIR activity and specificity.

[1186] Currently, the base conversions achievable by REPAIR are limited to generating inosine from adenosine; additional fusions of dCas13 with other catalytic RNA editing domains, such as APOBEC, could enable cytidine to uridine editing. Additionally, mutagenesis of ADAR could relax the substrate preference to target cytidine, allowing for the enhanced specificity conferred by the duplexed RNA substrate requirement to be exploited by C->U editors. Adenosine to inosine editing on DNA substrates may also be possible with catalytically inactive DNA-targeting CRISPR effectors, such as dCas9 or dCpfl, either through formation of DNA-RNA heteroduplex targets(20) or mutagenesis of the ADAR domain.

[1187] REPAIR could be applied towards a range of therapeutic indications where A to I (A to G) editing can reverse or slow disease progression (FIGS. 66A-66G). First, expression of REPAIR for targeting causal, Mendelian G to A mutations in disease-relevant tissues could be used to revert deleterious mutations and treat disease. For example, stable REPAIR expression via AAV in brain tissue could be used to correct the GRIN2A missense mutation c.2191G>A (Asp731Asn) that causes focal epilepsy(28) or the APP missense mutation c.2149G>A (Val717Ile) causing early-onset Alzheimer's disease(29). Second, REPAIR could be used to treat disease by modifying the function of proteins involved in disease-related signal transduction. For instance, REPAIR editing would allow the re-coding of some serine, threonine and tyrosine residues that are the targets of kinases (FIGS. 66A-66G). Phosphorylation of these residues in disease-relevant proteins affects disease progression for many disorders including Alzheimer's disease and multiple neurodegenerative conditions(30). Third, REPAIR could be used to change the sequence of expressed, risk-modifying G to A variants to pre-emptively decrease the chance of entering a disease state for patients. The most intriguing case are the ‘protective’ risk-modifying alleles, which dramatically decrease the chance of entering a disease state, and in some cases, confer additional health benefits. For instance, REPAIR could be used to functionally mimic A to G alleles of PCSK9 and IFIH1 that protect against cardiovascular disease and psoriatic arthritis (31, 39), respectively. Last, REPAIR can be used to therapeutically modify splice acceptor and donor sites for exon modulation therapies. REPAIR can change AU to IU or AA to AI, the functional equivalent of the consensus 5′ splice donor or 3′ splice acceptor sites respectively, creating new splice junctions. Additionally, REPAIR editing can mutate the consensus 3′ splice acceptor site from AG->IG to promote skipping of the adjacent downstream exon, a therapeutic strategy that has received significant interest for the treatment of DMD. Modulation of splice sites could have broad applications in diseases where anti-sense oligos have had some success, such as for modulation of SMN2 splicing for treatment of spinal muscular atrophy(32).

[1188] We have demonstrated the use of the PspCas13b enzyme as both an RNA knockdown and RNA editing tool. The dCas13b platform for programmable RNA binding has many applications, including live transcript imaging, splicing modification, targeted localization of transcripts, pull down of RNA-binding proteins, and epitranscriptomic modifications. Here, we used dCas13 to create REPAIR, adding to the existing suite of WO2019/084063 PCT/US2018/057179 nucleic acid editing technologies. REPAIR provides anew approach for treating genetic disease or mimicking protective alleles, and establishes RNA editing as auseful tool for modifying genetic function.

TABLE 6
Cas13 Orthologs used in this study

| Cas13 ID | Cas13 abbreviation | Host Organism | Protein Accession |
|---|---|---|---|
| Cas13a1 | LshCas13 a | Leptotrichia shahii | WP_018451595.1 |
| Cas13a2 | LwaCas13a | Leptotrichia wadei (Lw2) | WP_021746774.1 |
| Cas13a3 | LseCas13a | Listeria seeligeri | WP_012985477.1 |
| Cas13a4 | LbmCas13a | Lachnospiraceae bacterium MA2020 | WP_044921188.1 |
| Cas13a5 | LbnCas13a | Lachnospiraceae bacterium NK4A179 | WP_022785443.1 |
| Cas13a6 | CamCas13a | [Clostridium] aminophilum DSM 10710 | WP_031473346.1 |
| Cas13a7 | CgaCas13a | Carnobacterium gallinarum DSM 4847 | WP_034560163.1 |
| Cas13a8 | Cga2Cas13a | Carnobacterium gallinarum DSM 4847 | WP_034563842.1 |
| Cas13a9 | Pprcas13a | Paludibacter propionicigenes WB4 | WP_013443710.1 |
| Cas13a10 | LweCas13a | Listeria weihenstephanensis FSL R9-0317 | WP_036059185.1 |
| Cas13al1 | LbfCas13a | Listeriaceae bacterium FSL M6-0635 | WP_036091002.1 |
| Cas13a12 | Lwa2cas13a | Leptotrichia wadei F0279 | WP_021746774.1 |
| Cas13a13 | RcsCas13a | Rhodobacter capsulatus SB 1003 | WP_013067728.1 |
| Cas13a14 | RcrCas13 a | Rhodobacter capsulatus R121 | WP_023911507.1 |
| Cas13a15 | RcdCas13a | Rhodobacter capsulatus DE442 | WP_023911507.1 |
| Cas13a16 | LbuCas13a | Leptotrichia buccalis C-1013-b | WP_015770004.1 |
| Cas13a17 | HheCas13a | Herbinix hemicellulosilytica | CRZ35554.1 |
| Cas13a18 | EreCas13 a | [Eubacterium] rectale | WP_055061018.1 |
| Cas13a19 | EbaCas13a | Eubacteriaceae bacterium CHKCI004 | WP_090127496.1 |
| Cas13a20 | BmaCas13a | Blautia sp. Marseille-P2398 | WP_062808098.1 |
| Cas13a21 | LspCas13a | Leptotrichia sp. oral taxon 879 str. F0557 | WP_021744063.1 |
| Cas13b1 | BzoCas13b | Bergeyella zoohelcum | WP_002664492 |
| Cas13b2 | PinCas13b | Prevotella intermedia | WP_036860899 |
| Cas13b3 | PbuCas13b | Prevotella buccae | WP_004343973 |
| Cas13b4 | AspCas13b | Alistipes sp. ZOR0009 | WP_047447901 |
| Cas13b5 | PsmCas13b | Prevotella sp. MA2016 | WP_036929175 |
| Cas13b6 | RanCas13b | Riemerella anatipestifer | WP_004919755 |
| Cas13b7 | PauCas13b | Prevotella aurantiaca | WP_025000926 |
| Cas13b8 | PsaCas13b | Prevotella saccharolytica | WP_051522484 |
| Cas13b9 | Pin2Cas13b | Prevotella intermedia | WP_061868553 |
| Cas13b10 | CcaCas13b | Capnocytophaga canimorsus | WP_013997271 |
| Cas13b11 | PguCas13b | Porphyromonas gulae | WP_039434803 |
| Cas13b12 | PspCas13b | Prevotella sp. P5-125 | WP_044065294 |
| Cas13b13 | FbrCas13b | Flavobacterium branchiophilum | WP_014084666 |
| Cas13b14 | PgiCas13b | Porphyromonas gingivalis | WP_053444417 |
| Cas13b15 | Pin3Cas13b | Prevotella intermedia | WP_050955369 |
| Cas13c1 | FnsCas13c | Fusobacterium necrophorum subsp. | WP_005959231.1 |
| | | funduliforme ATCC 51357 contig00003 | |
| Cas13c2 | FndCas13c | Fusobacterium necrophorum DJ-2 | WP_035906563.1 |
| | | contig0065, whole genome shotgun sequence | |
| Cas13c3 | FnbCas13c | Fusobacterium necrophorum BFTR-1 | WP_035935671.1 |
| | | contig0068 | |
| Cas13c4 | FnfCas13c | Fusobacterium necrophorum subsp. | EH019081.1 |
| | | funduliforme 1_1_36S cont1.14 | |
| Cas13c5 | FpeCas13c | Fusobacterium perfoetens ATCC 29250 | WP_027128616.1 |
| | | T364DRAFT_scaffold00009.9_C | |
| Cas13c6 | FulCas13c | Fusobacterium ulcerans ATCC 49185 | WP_040490876.1 |
| | | cont2.38 | |
| Cas13c7 | AspCas13c | Anaerosalibacter sp. ND1 genome assembly | WP_042678931.1 |
| | | Anaerosalibacter massiliensis ND1 | |

TABLE 7
PFS cutoffs in bacterial screens

| | | -Log₂ depletion |
|---|---|---|
| | | score used to |
| Cas13b ortholog | Key | generate PFS motif |
| Bergeyella zoohelcum | 1 | 2 |
| Prevotella intermedia locus 1 | 2 | 1 |
| Prevotella buccae | 3 | 3 |
| Alistipes sp. ZOR0009 | 4 | 1 |
| Prevotella sp. MA2016 | 5 | 2 |
| Riemerella anatipestifer | 6 | 4 |
| Prevotella aurantiaca | 7 | 1 |
| Prevotella saccharolytica | 8 | 0 |
| Prevotella intermedia locus 2 | 9 | 0 |
| Capnocytophaga canimorsus | 10 | 3 |
| Porphyromonas gulae | 11 | 4 |
| Prevotella sp. P5-125 | 12 | 2.1 |
| Flavobacterium | 13 | 1 |
| branchiophllum | | |
| Porphyromonas gingivalis | 14 | 3 |
| Prevotella intermedia locus 2 | 15 | 4 |

TABLE 8
dCas13b-ADAR linker sequences used in
this study for RNA editing in mammalian cells.

| FIG. | linker |
|---|---|
| 50C (SEQ ID NO: 296) | GSGGGGS |
| 50E | GS |
| 57B (SEQ ID NO: 296) | GSGGGGS |
| 57C | GS |
| 57D | GS |
| 57E: GS | GS |
| 57E: GSGGGGS (SEQ ID NO: 296) | GSGGGGS |
| 57E: (GGGS)3 (SEQ ID NO: 855) | GGGGSGGGGSGGGGS |
| 57E: Rigid (SEQ ID NO: 297) | EAAAK |
| 57E: (GGS)6 (SEQ ID NO: 298) | GGSGGSGGSGGSGGSGGS |
| 57E: XTEN (SEQ ID NO: 299) | SGSETPGTSESATPES |
| 51B | GS |
| 57F | GS |
| 51C | GS |
| 52B | GS |
| 52D | GS |
| 52E | GS |
| 51A: Δ984-1090, Δ1026-1090, | GS |
| Δ1053-1090 | |
| 51A: Δ1-125, Δ1-88, Δ1-72 | GSGGGGS |
| (SEQ ID NO: 296) | |
| 53B | GS |
| 53C | GS |
| 53D | GS |
| 60A | GS |
| 60C | GS |
| 60D | GS |
| 61D | GS |
| 54A | GS |
| 62A | GS |
| 54B | GS |
| 62B | GS |
| 62C | GS |
| 63A | GS |
| 63B | GS |
| 54C | GS |
| 54D | GS |
| 54E | GS |
| 54F | GS |
| 66A | GS |
| 66A | GS |

TABLE 9
Disease information for disease-relevant mutations

| Full length candidates | Gene | Disease |
|---|---|---|
| NM_000054.4(AVPR2):c.878G > A | AVPR2 | Nephrogenic diabetes insipidus, |
| (p.Trp293Ter) | | X-linked |
| NM_000136.2(FANCC):c.1517G > A | FANCC | Fanconi anemia, |
| (p.Trp506Ter) | | complementation group C |
| Additional simulated candiates | | |
| Candidate | Gene | Disease |
| NM_000206.2(IL2RG):c.710G > A | IL2RG | X-linked severe combined |
| (p.Trp237Ter) | | immunodeficiency |
| NM_000132.3(F8):c.3144G > A | F8 | Hereditary factor VIII |
| (p.Trp1048Ter) | | deficiency disease |
| NM_000527.4(LDLR):c.1449G > A | LDLR | Familial hypercholesterolemia |
| (p.Trp483Ter) | | |
| NM_000071.2(CBS):c.162G > A | CBS | Homocystinuria due to CBS |
| (p.Trp54Ter) | | deficiency |
| NM_000518.4(HBB):c.114G > A | HBB | beta^{∧}0^{∧}Thalassemia\|beta |
| (p.Trp38Ter) | | Thalassemia |
| NM_000035.3(ALDOB):c.888G > A | ALDOB | Hereditary fructosuria |
| (p.Trp296Ter) | | |
| NM_004006.2(DMD):c.3747G > A | DMD | Duchenne muscular dystrophy |
| (p.Trp1249Ter) | | |
| NM_005359.5(SMAD4):c.906G > A | SMAD4 | Juvenile polyposis syndrome |
| (p.Trp302Ter) | | |
| NM_000059.3(BRCA2):c.582G > A | BRCA2 | Familial cancer of breast\|Breast- |
| (p.Trp194Ter) | | ovarian cancer, familial 2 |
| NM_000833.4(GRIN2A):c.3813G > A | GRIN2A | Epilepsy, focal, with speech disorder |
| (p.Trp1271Ter) | | and with or without mental retardation |
| NM_002977.3(SCN9A):c.2691G > A | SCN9A | Indifference to pain, congenital, |
| (p.Trp897Ter) | | autosomal recessive |
| NM_007375.3(TARDBP):c.943G > A | TARDBP | Amyotrophic lateral sclerosis |
| (p.A1a315Thr) | | type 10 |
| NM_000492.3(CFTR):c.3846G > A | CFTR | Cystic fibrosis\|Hereditary pancreatitis\|not |
| (p.Trp1282Ter) | | provided\|ataluren response - Efficacy |
| NM_130838.1(UBE3A):c.2304G > A | UBE3A | Angelman syndrome |
| (p.Trp768Ter) | | |
| NM_000543.4(SMPD1):c.168G > A | SMPD1 | Niemann-Pick disease, type A |
| (p.Trp56Ter) | | |
| NM_206933.2(USH2A):c.9390G > A | USH2A | Usher syndrome, type 2A |
| (p.Trp3130Ter) | | |
| NM_130799.2(MEN1):c.1269G > A | MEN1 | Hereditary cancer-predisposing |
| (p.Trp423Ter) | | syndrome |
| NM_177965.3(C8orf37):c.555G > A | C8orf37 | Retinitis pigmentosa 64 |
| (p.Trp185Ter) | | |
| NM_000249.3(MLH1):c.1998G > A | MLH1 | Lynch syndrome |
| (p.Trp666Ter) | | |
| NM_000548.4(TSC2):c.2108G > A | TSC2 | Tuberous sclerosis 2\|Tuberous |
| (p.Trp703Ter) | | sclerosis syndrome |
| NM_000267.3(NF1):c.7044G > A | NF1 | Neurofibromatosis, type 1 |
| (p.Trp2348Ter) | | |
| NM_000179.2(MSH6):c.3020G > A | MSH6 | Lynch syndrome |
| (p.Trp1007Ter) | | |
| NM_000344.3(SMN1):c.305G > A | SMN1 | Spinal muscular atrophy, type |
| (p.Trp102Ter) | | II\|Kugelberg-Welander disease |
| NM_024577.3(5H3TC2):c.920G > A | 5H3TC2 | Charcot-Marie-Tooth disease, |
| (p.Trp307Ter) | | type 4C |
| NM_001369.2(DNAH5):c.8465G > A | DNAH5 | Primary ciliary dyskinesia |
| (p.Trp2822Ter) | | |
| NM_004992.3(MECP2):c.311G > A | MECP2 | Rett syndrome |
| (p.Trp104Ter) | | |
| NM_032119.3(ADGRV1):c.7406G > A | ADGRV1 | Usher syndrome, type 2C |
| (p.Trp2469Ter) | | |
| NM_017651.4(AHI1):c.2174G > A | AHI1 | Joubert syndrome 3 |
| (p.Trp725Ter) | | |
| NM_004562.2(PRKN):c.1358G > A | PRKN | Parkinson disease 2 |
| (p.Trp453Ter) | | |
| NM_000090.3(COL3A1):c.3833G > A | COL3A1 | Ehlers-Danlos syndrome, type 4 |
| (p.Trp1278Ter) | | |
| NM_007294.3(BRCA1):c.5511G > A | BRCA1 | Familial cancer of breast\|Breast- |
| (p.Trp1837Ter) | | ovarian cancer, familial 1 |
| NM_000256.3(MYBPC3):c.3293G > A | MYBPC3 | Primary familial hypertrophic |
| (p.Trp1098Ter) | | cardiomyopathy |
| NM_000038.5(APC):c.1262G > A | APC | Familial adenomatous polyposis 1 |
| (p.Trp421Ter) | | |
| NM_001204.6(BMPR2):c.893G > A | BMPR2 | Primary pulmonary |
| (p.W298*) | | hypertension |

TABLE 10
Key plasmids used in this study

| Plasmid name | Description |
|---|---|
| pAB0006 | CMV-Cluciferase-polyA EF1a-G-luciferase-polyA |
| pAB0040 | CMV-Cluciferase(STOP85)-polyA EF1a-G- |
| | luciferase-polyA |
| pAB0048 | pCDNA-ADAR2-N-terminal B12-HIV NES |
| pAB0050 | pAB0001-A02 (crRNA backbone) |
| pAB0051 | pAB0001-B06 (crRNA backbone) |
| pAB0052 | pAB0001-B11 (crRNA backbone) |
| pAB0053 | pAB0001-B12 (crRNA backbone) |
| pAB0014.B6 | EF1a-BsiWI-Cas13b6-NES-mapk |
| pAB0013.B11 | EF1a-BsiWI-Cas13b11-NES-HIV |
| pAB0013.B12 | EF1a-BsiWI-Cas13b12-NES-HIV |
| pAB0051 | pAB0001-B06 (crRNA backbone) |
| pAB0052 | pAB0001-B11 (crRNA backbone) |
| pAB0053 | pAB0001-B12 (crRNA backbone) |
| pAB0079 | pCDNA-ADAR1hu-EQmutant-N-terminal |
| | destination vector |
| pAB0085 | pCDNA-ADAR2 (E488Q)hu-EQmutant-N- |
| | terminal destination vector |
| pAB0095 | EFla-BsiWI-Cas13-B12-NES-HIV, with |
| | double H HEPN mutant |
| pAB0114 | pCDNA-wtADAR2hu-EQmutant-N-terminal |
| | destination vector |
| pAB0120 | Luciferase ADAR guide optimal (guide 24 |
| | from wC0054) |
| pAB0122 | pAB0001-B12 NT guide for ADAR experiments |
| pAB0151 | pCDNA-ADAR2hu-EQmutant-N-terminal |
| | destination vector C-term delta 984-1090 |
| pAB0180 | T375G specificity mutant |
| pAB0181 | T375G Cas13b C-term delta 984-1090 |

TABLE 11
Guide/shRNA sequences used in this
study for knockdown in mammalian cells

| | | Interference | | First |
|---|---|---|---|---|
| Name | Spacer sequence | Mechanism | Notes | FIG. |
| Bacterial | GCCAGCUUUCCGGGCAUUGGC | Cas13b | Used for all | |
| PFS guide | UUCCAUC | | orthologs | |
| | (SEQ ID No. 300) | | | |
| Cas13a- | GCCAGCUUUCCGGGCAUUGGC | Cas13a | Used for all | FIG. 49B |
| Gluc | UUCCAUC (SEQ ID No. 301) | | Cas13a | |
| guide 1 | | | orthologs | |
| Cas13a- | ACCCAGGAAUCUCAGGAAUGU | Cas13a | Used for all | FIG. 49B |
| Gluc | CGACGAU (SEQ ID No. 302) | | Cas13a | |
| guide 2 | | | orthologs | |
| Cas13a- | AGGGUUUUCCCAGUCACGACG | Cas13a | Used for all | FIG. 49B |
| non- | UUGUAAA (SEQ ID No. 303) | | Cas13a | |
| targeting | | | orthologs | |
| guide | | | | |
| (LacZ) | | | | |
| Cas13b- | GGGCAUUGGCUUCCAUCUCUU | Cas13b | Used for | FIG. 49B |
| Gluc | UGAGCACCU (SEQ ID No. 304) | | orthologs 1-3, 6, | |
| guide 1.1 | | | 7, 10, 11, 12, | |
| | | | 14, 15 | |
| Cas13b- | GUGCAGCCAGCUUUCCGGGCA | Cas13b | Used for | FIG. 49B |
| Gluc | UUGGCUUCC (SEQ ID No. 305) | | ortholog 4 | |
| guide 1.2 | | | | |
| Cas13b- | GCAGCCAGCUUUCCGGGCAUU | Cas13b | Used for | FIG. 49B |
| Gluc | GGCUUCCAU (SEQ ID No. 306) | | ortholog 5 | |
| guide 1.3 | | | | |
| Cas13b- | GGCUUCCAUCUCUUUGAGCAC | Cas13b | Used for | FIG. 49B |
| Gluc | CUCCAGCGG (SEQ ID No. 307) | | ortholog 8, 9 | |
| guide 1.4 | | | | |
| Cas13b- | GGAAUGUCGACGAUCGCCUCG | Cas13b | Used for | FIG. 49B |
| Gluc | CCUAUGCCG (SEQ ID No. 308) | | ortholog 13 | |
| guide 1.5 | | | | |
| Cas13b- | GAAUGUCGACGAUCGCCUCGC | Cas13b | Used for | FIG. 49B |
| Gluc | CUAUGCCGC (SEQ ID No. 309) | | orthologs 1-3, 6, | |
| guide 2.1 | | | 7, 10, 11, 14, 15 | |
| Cas13b- | GACCUGUGCGAUGAACUGCUC | Cas13b | Used for | FIG. 49B |
| Gluc | CAUGGGCUC (SEQ ID No. 310) | | ortholog 12 | |
| guide 2.2 | | | | |
| Cas13b- | GUGUGGCAGCGUCCUGGGAUG | Cas13b | Used for | FIG. 49B |
| Gluc | AACUUCUUC (SEQ ID No. 311) | | ortholog 4 | |
| guide 2.2 | | | | |
| Cas13b- | GUGGCAGCGUCCUGGGAUGAA | Cas13b | Used for | FIG. 49B |
| Gluc | CUUCUUCAU (SEQ ID No. 312) | | ortholog 5 | |
| guide 2.3 | | | | |
| Cas13b- | GCUUCUUGCCGGGCAACUUCC | Cas13b | Used for | FIG. 49B |
| Gluc | CGCGGUCAG (SEQ ID No. 313) | | ortholog 8, 9 | |
| guide 2.4 | | | | |
| Cas13b- | GCAGGGUUUUCCCAGUCACGA | Cas13b | Used for | FIG. 49B |
| Gluc | CGUUGUAAAA (SEQ ID No. 314) | | ortholog 13 | |
| guide 2.6 | | | | |
| Cas13b- | GCAGGGUUUUCCCAGUCACGA | Cas13b | Used for all | FIG. 49B |
| non | CGUUGUAAAA (SEQ ID No. 315) | | orthologs | |
| targeting | | | | |
| guide | | | | |
| Cas13a- | ACCCAGGAAUCUCAGGAAUGU | Cas13a | | FIG. 49E |
| Gluc | CGACGAU (SEQ ID No. 316) | | | |
| guide- | | | | |
| RNASeq | | | | |
| shRNA- | CAGCUUUCCGGGCAUUGGCUU | shRNA | | FIG. 49F |
| Gluc | (SEQ ID No. 317) | | | |
| guide | | | | |
| Cas13b- | CCGCUGGAGGUGCUCAAAGAG | Cas13b | | FIG. 49F |
| Gluc | AUGGAAGCC (SEQ ID No. 318) | | | |
| guide- | | | | |
| RNASeq | | | | |
| Cas13a- | GCCAGCUUUCCGGGCAUUGGC | Cas13a | | FIG. 56A |
| Gluc- | UUCCAUC (SEQ ID No. 319) | | | |
| guide-1 | | | | |
| Cas13a- | ACCCAGGAAUCUCAGGAAUGU | Cas13a | | FIG. 56A |
| Gluc- | CGACGAU (SEQ ID No. 320) | | | |
| guide-2 | | | | |
| Cas13b- | GGGCAUUGGCUUCCAUCUCUU | Cas13b | | FIG. 56A |
| Gluc-opt- | UGAGCACCU (SEQ ID No. 321) | | | |
| guide-1 | | | | |
| Cas13b- | GAAUGUCGACGAUCGCCUCGC | Cas13b | | FIG. 56A |
| Gluc-opt- | CUAUGCCGC (SEQ ID No. 322) | | | |
| guide-2 | | | | |
| Cas13a | CAAGGCACUCUUGCCUACGCC | Cas13a | | FIG. 56B |
| KRAS | ACCAGCU (SEQ ID No. 323) | | | |
| guide 1 | | | | |
| Cas13a | UCAUAUUCGUCCACAAAAUGA | Cas13a | | FIG. 56B |
| KRAS | UUCUGAA (SEQ ID No. 324) | | | |
| guide 2 | | | | |
| Cas13a | AUUAUUUAUGGCAAAUACACA | Cas13a | | FIG. 56B |
| KRAS | AAGAAAG (SEQ ID No. 325) | | | |
| guide 3 | | | | |
| Cas13a | GAAUAUCUUCAAAUGAUUUAG | Cas13a | | FIG. 56B |
| KRAS | UAUUAUU (SEQ ID No. 326) | | | |
| guide 4 | | | | |
| Cas13a | ACCAUAGGUACAUCUUCAGAG | Cas13a | | FIG. 56B |
| KRAS | UCCUUAA (SEQ ID No. 327) | | | |
| guide 5 | | | | |
| Cas13b | GUCAAGGCACUCUUGCCUACG | Cas13b | | FIG. 56B |
| KRAS | CCACCAGCU (SEQ ID No. 328) | | | |
| guide 1 | | | | |
| Cas13b | GAUCAUAUUCGUCCACAAAAU | Cas13b | | FIG. 56B |
| KRAS | GAUUCUGAA (SEQ ID No. 329) | | | |
| guide 2 | | | | |
| Cas13b | GUAUUAUUUAUGGCAAAUACA | Cas13b | | FIG. 56B |
| KRAS | CAAAGAAAG (SEQ ID No. 330) | | | |
| guide 3 | | | | |
| Cas13b | GUGAAUAUCUUCAAAUGAUUU | Cas13b | | FIG. 56B |
| KRAS | AGUAUUAUU (SEQ ID No. 331) | | | |
| guide 4 | | | | |
| Cas13b | GGACCAUAGGUACAUCUUCAG | Cas13b | | FIG. 56B |
| KRAS | AGUCCUUAA (SEQ ID No. 332) | | | |
| guide 5 | | | | |
| shRNA | aagagtgccttgacgatacagc | shRNA | | FIG. 56B |
| KRAS | CUCGAGgctgtatcgtcaaggc | | | |
| guide 1 | actctt (SEQ ID No. 333) | | | |
| shRNA | aatcattttgtggacgaatatCU | shRNA | | FIG. 56B |
| KRAS | CGAGatattcgtccacaaaatga | | | |
| guide 2 | tt (SEQ ID No. 334) | | | |
| shRNA | aaataatactaaatcatttgaCU | shRNA | | FIG. 56B |
| KRAS | CGAGtcaaatgatttagtattat | | | |
| guide 3 | tt (SEQ ID No. 335) | | | |
| shRNA | aataatactaaatcatttgaaC | shRNA | | FIG. 56B |
| KRAS | UCGAGttcaaatgatttagtat | | | |
| guide 4 | tatt (SEQ ID No. 336) | | | |
| shRNA | aaggactctgaagatgtacctC | shRNA | | FIG. 56B |
| KRAS | UCGAGaggtacatcttcagagt | | | |
| guide 5 | cctt (SEQ ID No. 337) | | | |

TABLE 12
Guide sequences used for Gluc knockdown

| | | | | First |
|---|---|---|---|---|
| Name | Spacer sequence | Position | Notes | FIG. |
| Gluc tiling | GAGAUCAGGGCAAACAG | 2 | Note that the Cas13a spacers | 49C |
| guide 1 | AACUUUGACUCCC | | are truncated by two | |
| | (SEQ ID No. 338) | | nucleotides at the 5′ end | |
| Gluc tiling | GGAUGCAGAUCAGGGCA | 7 | Note that the Cas13a spacers | 49C |
| guide 2 | AACAGAACUUUGA | | are truncated by two | |
| | (SEQ ID No. 339) | | nucleotides at the 5′ end | |
| Gluc tiling | GCACAGCGAUGCAGAUC | 13 | Note that the Cas13a spacers | 49C |
| guide 3 | AGGGCAAACAGAA | | are truncated by two | |
| | (SEQ ID No. 340) | | nucleotides at the 5′ end | |
| Gluc tiling | GCUCGGCCACAGCGAUG | 19 | Note that the Cas13a spacers | 49C |
| guide 4 | CAGAUCAGGGCAA | | are truncated by two | |
| | (SEQ ID No. 341) | | nucleotides at the 5′ end | |
| Gluc tiling | GGGGCUUGGCCUCGGCC | 28 | Note that the Cas13a spacers | 49C |
| guide 5 | ACAGCGAUGCAGA | | are truncated by two | |
| | (SEQ ID No. 342) | | nucleotides at the 5′ end | |
| Gluc tiling | GUGGGCUUGGCCUCGGC | 29 | Note that the Cas13a spacers | 49C |
| guide 6 | CACAGCGAUGCAG | | are truncated by two | |
| | (SEQ ID No. 343) | | nucleotides at the 5′ end | |
| Gluc tiling | GUCUCGGUGGGCUUGGC | 35 | Note that the Cas13a spacers | 49C |
| guide 7 | CUCGGCCACAGCG | | are truncated by two | |
| | (SEQ ID No. 344) | | nucleotides at the 5′ end | |
| Gluc tiling | GUUCGUUGUUCUCGGUG | 43 | Note that the Cas13a spacers | 49C |
| guide 8 | GGCUUGGCCUCGG | | are truncated by two | |
| | (SEQ ID No. 345) | | nucleotides at the 5′ end | |
| Gluc tiling | GGAAGUCUUCGUUGUUC | 49 | Note that the Cas13a spacers | 49C |
| guide 9 | UCGGUGGGCUUGG | | are truncated by two | |
| | (SEQ ID No. 346) | | nucleotides at the 5′ end | |
| Gluc tiling | GAUGUUGAAGUCUUCGU | 54 | Note that the Cas13a spacers | 49C |
| guide 10 | UGUUCUCGGUGGG | | are truncated by two | |
| | (SEQ ID No. 347) | | nucleotides at the 5′ end | |
| Gluc tiling | GCGGCCACGAUGUUGAA | 62 | Note that the Cas13a spacers | 49C |
| guide 11 | GUCUUCGUUGUUC | | are truncated by two | |
| | (SEQ ID No. 348) | | nucleotides at the 5′ end | |
| Gluc tiling | GUGGCCACGGCCACGAU | 68 | Note that the Cas13a spacers | 49C |
| guide 12 | GUUGAAGUCUUCG | | are truncated by two | |
| | (SEQ ID No. 349) | | nucleotides at the 5′ end | |
| Gluc tiling | GGUUGCUGGCCACGGCC | 73 | Note that the Cas13a spacers | 49C |
| guide 13 | ACGAUGUUGAAGU | | are truncated by two | |
| | (SEQ ID No. 350) | | nucleotides at the 5′ end | |
| Gluc tiling | GUCGCGAAGUUGCUGGC | 80 | Note that the Cas13a spacers | 49C |
| guide 14 | CACGGCCACGAUG | | are truncated by two | |
| | (SEQ ID No. 351) | | nucleotides at the 5′ end | |
| Gluc tiling | GCCGUGGUCGCGAAGUU | 86 | Note that the Cas13a spacers | 49C |
| guide 15 | GCUGGCCACGGCC | | are truncated by two | |
| | (SEQ ID No. 352) | | nucleotides at the 5′ end | |
| Gluc tiling | GCGAGAUCCGUGGUCGC | 92 | Note that the Cas13a spacers | 49C |
| guide 16 | GAAGUUGCUGGCC | | are truncated by two | |
| | (SEQ ID No. 353) | | nucleotides at the 5′ end | |
| Gluc tiling | GCAGCAUCGAGAUCCGU | 98 | Note that the Cas13a spacers | 49C |
| guide 17 | GGUCGCGAAGUUG | | are truncated by two | |
| | (SEQ ID No. 354) | | nucleotides at the 5′ end | |
| Gluc tiling | GGGUCAGCAUCGAGAUC | 101 | Note that the Cas13a spacers | 49C |
| guide 18 | CGUGGUCGCGAAG | | are truncated by two | |
| | (SEQ ID No. 355) | | nucleotides at the 5′ end | |
| Gluc tiling | GCUUCCCGCGGUCAGCA | 109 | Note that the Cas13a spacers | 49C |
| guide 19 | UCGAGAUCCGUGG | | are truncated by two | |
| | (SEQ ID No. 356) | | nucleotides at the 5′ end | |
| Gluc tiling | GGGGCAACUUCCCGCGG | 115 | Note that the Cas13a spacers | 49C |
| guide 20 | UCAGCAUCGAGAU | | are truncated by two | |
| | (SEQ ID No. 357) | | nucleotides at the 5′ end | |
| Gluc tiling | GUCUUGCCGGGCAACUU | 122 | Note that the Cas13a spacers | 49C |
| guide 21 | CCCGCGGUCAGCA | | are truncated by two | |
| | (SEQ ID No. 358) | | nucleotides at the 5′ end | |
| Gluc tiling | GGCAGCUUCUUGCCGGG | 128 | Note that the Cas13a spacers | 49C |
| guide 22 | CAACUUCCCGCGG | | are truncated by two | |
| | (SEQ ID No. 359) | | nucleotides at the 5′ end | |
| Gluc tiling | GCCAGCGGCAGCUUCUU | 134 | Note that the Cas13a spacers | 49C |
| guide 23 | GCCGGGCAACUUC | | are truncated by two | |
| | (SEQ ID No. 360) | | nucleotides at the 5′ end | |
| Gluc tiling | GCACCUCCAGCGGCAGC | 139 | Note that the Cas13a spacers | 49C |
| guide 24 | UUCUUGCCGGGCA | | are truncated by two | |
| | (SEQ ID No. 361) | | nucleotides at the 5′ end | |
| Gluc tiling | GCUUUGAGCACCUCCAG | 146 | Note that the Cas13a spacers | 49C |
| guide 25 | CGGCAGCUUCUUG | | are truncated by two | |
| | (SEQ ID No. 362) | | nucleotides at the 5′ end | |
| Gluc tiling | GCAUCUCUUUGAGCACC | 151 | Note that the Cas13a spacers | 49C |
| guide 26 | UCCAGCGGCAGCU | | are truncated by two | |
| | (SEQ ID No. 363) | | nucleotides at the 5′ end | |
| Gluc tiling | GUCCAUCUCUUUGAGCA | 153 | Note that the Cas13a spacers | 49C |
| guide 27 | CCUCCAGCGGCAG | | are truncated by two | |
| | (SEQ ID No. 364) | | nucleotides at the 5′ end | |
| Gluc tiling | GGGCAUUGGCUUCCAUC | 163 | Note that the Cas13a spacers | 49C |
| guide 28 | UCUUUGAGCACCU | | are truncated by two | |
| | (SEQ ID No. 365) | | nucleotides at the 5′ end | |
| Gluc tiling | GUCCGGGCAUUGGCUUC | 167 | Note that the Cas13a spacers | 49C |
| guide 29 | CAUCUCUUUGAGC | | are truncated by two | |
| | (SEQ ID No. 366) | | nucleotides at the 5′ end | |
| Gluc tiling | GGCCAGCUUUCCGGGCA | 175 | Note that the Cas13a spacers | 49C |
| guide 30 | UUGGCUUCCAUCU | | are truncated by two | |
| | (SEQ ID No. 367) | | nucleotides at the 5′ end | |
| Gluc tiling | GGGUGCAGCCAGCUUUC | 181 | Note that the Cas13a spacers | 49C |
| guide 31 | CGGGCAUUGGCUU | | are truncated by two | |
| | (SEQ ID No. 368) | | nucleotides at the 5′ end | |
| Gluc tiling | GAGCCCCUGGUGCAGCC | 188 | Note that the Cas13a spacers | 49C |
| guide 32 | AGCUUUCCGGGCA | | are truncated by two | |
| | (SEQ ID No. 369) | | nucleotides at the 5′ end | |
| Gluc tiling | GAUCAGACAGCCCCUGG | 195 | Note that the Cas13a spacers | 49C |
| guide 33 | UGCAGCCAGCUUU | | are truncated by two | |
| | (SEQ ID No. 370) | | nucleotides at the 5′ end | |
| Gluc tiling | GGCAGAUCAGACAGCCC | 199 | Note that the Cas13a spacers | 49C |
| guide 34 | CUGGUGCAGCCAG | | are truncated by two | |
| | (SEQ ID No. 371) | | nucleotides at the 5′ end | |
| Gluc tiling | GACAGGCAGAUCAGACA | 203 | Note that the Cas13a spacers | 49C |
| guide 35 | GCCCCUGGUGCAG | | are truncated by two | |
| | (SEQ ID No. 372) | | nucleotides at the 5′ end | |
| Gluc tiling | GUGAUGUGGGACAGGCA | 212 | Note that the Cas13a spacers | 49C |
| guide 36 | GAUCAGACAGCCC | | are truncated by two | |
| | (SEQ ID No. 373) | | nucleotides at the 5′ end | |
| Gluc tiling | GACUUGAUGUGGGACAG | 215 | Note that the Cas13a spacers | 49C |
| guide 37 | GCAGAUCAGACAG | | are truncated by two | |
| | (SEQ ID No. 374) | | nucleotides at the 5′ end | |
| Gluc tiling | GGGGCGUGCACUUGAUG | 223 | Note that the Cas13a spacers | 49C |
| guide 38 | UGGGACAGGCAGA | | are truncated by two | |
| | (SEQ ID No. 375) | | nucleotides at the 5′ end | |
| Gluc tiling | GCUUCAUCUUGGGCGUG | 232 | Note that the Cas13a spacers | 49C |
| guide 39 | CACUUGAUGUGGG | | are truncated by two | |
| | (SEQ ID No. 376) | | nucleotides at the 5′ end | |
| Gluc tiling | GUGAACUUCUUCAUCUU | 239 | Note that the Cas13a spacers | 49C |
| guide 40 | GGGCGUGCACUUG | | are truncated by two | |
| | (SEQ ID No. 377) | | nucleotides at the 5′ end | |
| Gluc tiling | GGGAUGAACUUCUUCAU | 242 | Note that the Cas13a spacers | 49C |
| guide 41 | CUUGGGCGUGCAC | | are truncated by two | |
| | (SEQ ID No. 378) | | nucleotides at the 5′ end | |
| Gluc tiling | GUGGGAUGAACUUCUUC | 244 | Note that the Cas13a spacers | 49C |
| guide 42 | AUCUUGGGCGUGC | | are truncated by two | |
| | (SEQ ID No. 379) | | nucleotides at the 5′ end | |
| Gluc tiling | GGGCAGCGUCCUGGGAU | 254 | Note that the Cas13a spacers | 49C |
| guide 43 | GAACUUCUUCAUC | | are truncated by two | |
| | (SEQ ID No. 380) | | nucleotides at the 5′ end | |
| Gluc tiling | GGGUGUGGCAGCGUCCU | 259 | Note that the Cas13a spacers | 49C |
| guide 44 | GGGAUGAACUUCU | | are truncated by two | |
| | (SEQ ID No. 381) | | nucleotides at the 5′ end | |
| Gluc tiling | GUUCGUAGGUGUGGCAG | 265 | Note that the Cas13a spacers | 49C |
| guide 45 | CGUCCUGGGAUGA | | are truncated by two | |
| | (SEQ ID No. 382) | | nucleotides at the 5′ end | |
| Gluc tiling | GCGCCUUCGUAGGUGUG | 269 | Note that the Cas13a spacers | 49C |
| guide 46 | GCAGCGUCCUGGG | | are truncated by two | |
| | (SEQ ID No. 383) | | nucleotides at the 5′ end | |
| Gluc tiling | GUCUUUGUCGCCUUCGU | 276 | Note that the Cas13a spacers | 49C |
| guide 47 | AGGUGUGGCAGCG | | are truncated by two | |
| | (SEQ ID No. 384) | | nucleotides at the 5′ end | |
| Gluc tiling | GCUUUGUCGCCUUCGUA | 275 | Note that the Cas13a spacers | 49C |
| guide 48 | GGUGUGGCAGCGU | | are truncated by two | |
| | (SEQ ID No. 385) | | nucleotides at the 5′ end | |
| Gluc tiling | GUGCCGCCCUGUGCGGA | 293 | Note that the Cas13a spacers | 49C |
| guide 49 | CUCUUUGUCGCCU | | are truncated by two | |
| | (SEQ ID No. 386) | | nucleotides at the 5′ end | |
| Gluc tiling | GUAUGCCGCCCUGUGCG | 295 | Note that the Cas13a spacers | 49C |
| guide 50 | GACUCUUUGUCGC | | are truncated by two | |
| | (SEQ ID No. 387) | | nucleotides at the 5′ end | |
| Gluc tiling | GCCUCGCCUAUGCCGCCC | 302 | Note that the Cas13a spacers | 49C |
| guide 51 | UGUGCGGACUCU | | are truncated by two | |
| | (SEQ ID No. 388) | | nucleotides at the 5′ end | |
| Gluc tiling | GGAUCGCCUCGCCUAUG | 307 | Note that the Cas13a spacers | 49C |
| guide 52 | CCGCCCUGUGCGG | | are truncated by two | |
| | (SEQ ID No. 389) | | nucleotides at the 5′ end | |
| Gluc tiling | GAUGUCGACGAUCGCCU | 315 | Note that the Cas13a spacers | 49C |
| guide 53 | CGCCUAUGCCGCC | | are truncated by two | |
| | (SEQ ID No. 390) | | nucleotides at the 5′ end | |
| Gluc tiling | GCAGGAAUGUCGACGAU | 320 | Note that the Cas13a spacers | 49C |
| guide 54 | CGCCUCGCCUAUG | | are truncated by two | |
| | (SEQ ID No. 391) | | nucleotides at the 5′ end | |
| Gluc tiling | GAAUCUCAGGAAUGUCG | 325 | Note that the Cas13a spacers | 49C |
| guide 55 | ACGAUCGCCUCGC | | are truncated by two | |
| | (SEQ ID No. 392) | | nucleotides at the 5′ end | |
| Gluc tiling | GCCCAGGAAUCUCAGGA | 331 | Note that the Cas13a spacers | 49C |
| guide 56 | AUGUCGACGAUCG | | are truncated by two | |
| | (SEQ ID No. 393) | | nucleotides at the 5′ end | |
| Gluc tiling | GCCUUGAACCCAGGAAU | 338 | Note that the Cas13a spacers | 49C |
| guide 57 | CUCAGGAAUGUCG | | are truncated by two | |
| | (SEQ ID No. 394) | | nucleotides at the 5′ end | |
| Gluc tiling | GCCAAGUCCUUGAACCC | 344 | Note that the Cas13a spacers | 49C |
| guide 58 | AGGAAUCUCAGGA | | are truncated by two | |
| | (SEQ ID No. 395) | | nucleotides at the 5′ end | |
| Gluc tiling | GUGGGCUCCAAGUCCUU | 350 | Note that the Cas13a spacers | 49C |
| guide 59 | GAACCCAGGAAUC | | are truncated by two | |
| | (SEQ ID No. 396) | | nucleotides at the 5′ end | |
| Gluc tiling | GCCAUGGGCUCCAAGUC | 353 | Note that the Cas13a spacers | 49C |
| guide 60 | CUUGAACCCAGGA | | are truncated by two | |
| | (SEQ ID No. 397) | | nucleotides at the 5′ end | |
| Gluc tiling | GGAACUGCUCCAUGGGC | 361 | Note that the Cas13a spacers | 49C |
| guide 61 | UCCAAGUCCUUGA | | are truncated by two | |
| | (SEQ ID No. 398) | | nucleotides at the 5′ end | |
| Gluc tiling | GUGCGAUGAACUGCUCC | 367 | Note that the Cas13a spacers | 49C |
| guide 62 | AUGGGCUCCAAGU | | are truncated by two | |
| | (SEQ ID No. 399) | | nucleotides at the 5′ end | |
| Gluc tiling | GGACCUGUGCGAUGAAC | 373 | Note that the Cas13a spacers | 49C |
| guide 63 | UGCUCCAUGGGCU | | are truncated by two | |
| | (SEQ ID No. 400) | | nucleotides at the 5′ end | |
| Gluc tiling | GACAGAUCGACCUGUGC | 380 | Note that the Cas13a spacers | 49C |
| guide 64 | GAUGAACUGCUCC | | are truncated by two | |
| | (SEQ ID No. 401) | | nucleotides at the 5′ end | |
| Gluc tiling | GACACACAGAUCGACCU | 384 | Note that the Cas13a spacers | 49C |
| guide 65 | GUGCGAUGAACUG | | are truncated by two | |
| | (SEQ ID No. 402) | | nucleotides at the 5′ end | |
| Gluc tiling | GUGCAGUCCACACACAG | 392 | Note that the Cas13a spacers | 49C |
| guide 66 | AUCGACCUGUGCG | | are truncated by two | |
| | (SEQ ID No. 403) | | nucleotides at the 5′ end | |
| Gluc tiling | GCCAGUUGUGCAGUCCA | 399 | Note that the Cas13a spacers | 49C |
| guide 67 | CACACAGAUCGAC | | are truncated by two | |
| | (SEQ ID No. 404) | | nucleotides at the 5′ end | |
| Gluc tiling | GGGCAGCCAGUUGUGCA | 404 | Note that the Cas13a spacers | 49C |
| guide 68 | GUCCACACACAGA | | are truncated by two | |
| | (SEQ ID No. 405) | | nucleotides at the 5′ end | |
| Gluc tiling | GUUUGAGGCAGCCAGUU | 409 | Note that the Cas13a spacers | 49C |
| guide 69 | GUGCAGUCCACAC | | are truncated by two | |
| | (SEQ ID No. 406) | | nucleotides at the 5′ end | |
| Gluc tiling | GAAGCCCUUUGAGGCAG | 415 | Note that the Cas13a spacers | 49C |
| guide 70 | CCAGUUGUGCAGU | | are truncated by two | |
| | (SEQ ID No. 407) | | nucleotides at the 5′ end | |
| Gluc tiling | GCACGUUGGCAAGCCCU | 424 | Note that the Cas13a spacers | 49C |
| guide 71 | UUGAGGCAGCCAG | | are truncated by two | |
| | (SEQ ID No. 408) | | nucleotides at the 5′ end | |
| Gluc tiling | GACUGCACGUUGGCAAG | 428 | Note that the Cas13a spacers | 49C |
| guide 72 | CCCUUUGAGGCAG | | are truncated by two | |
| | (SEQ ID No. 409) | | nucleotides at the 5′ end | |
| Gluc tiling | GGGUCAGAACACUGCAC | 437 | Note that the Cas13a spacers | 49C |
| guide 73 | GUUGGCAAGCCCU | | are truncated by two | |
| | (SEQ ID No. 410) | | nucleotides at the 5′ end | |
| Gluc tiling | GCAGGUCAGAACACUGC | 439 | Note that the Cas13a spacers | 49C |
| guide 74 | ACGUUGGCAAGCC | | are truncated by two | |
| | (SEQ ID No. 411) | | nucleotides at the 5′ end | |
| Gluc tiling | GAGCAGGUCAGAACACU | 441 | Note that the Cas13a spacers | 49C |
| guide 75 | GCACGUUGGCAAG | | are truncated by two | |
| | (SEQ ID No. 412) | | nucleotides at the 5′ end | |
| Gluc tiling | GGCCACUUCUUGAGCAG | 452 | Note that the Cas13a spacers | 49C |
| guide 76 | GUCAGAACACUGC | | are truncated by two | |
| | (SEQ ID No. 413) | | nucleotides at the 5′ end | |
| Gluc tiling | GCGGCAGCCACUUCUUG | 457 | Note that the Cas13a spacers | 49C |
| guide 77 | AGCAGGUCAGAAC | | are truncated by two | |
| | (SEQ ID No. 414) | | nucleotides at the 5′ end | |
| Gluc tiling | GUGCGGCAGCCACUUCU | 459 | Note that the Cas13a spacers | 49C |
| guide 78 | UGAGCAGGUCAGA | | are truncated by two | |
| | (SEQ ID No. 415) | | nucleotides at the 5′ end | |
| Gluc tiling | GAGCGUUGCGGCAGCCA | 464 | Note that the Cas13a spacers | 49C |
| guide 79 | CUUCUUGAGCAGG | | are truncated by two | |
| | (SEQ ID No. 416) | | nucleotides at the 5′ end | |
| Gluc tiling | GAAAGGUCGCACAGCGU | 475 | Note that the Cas13a spacers | 49C |
| guide 80 | UGCGGCAGCCACU | | are truncated by two | |
| | (SEQ ID No. 417) | | nucleotides at the 5′ end | |
| Gluc tiling | GCUGGCAAAGGUCGCAC | 480 | Note that the Cas13a spacers | 49C |
| guide 81 | AGCGUUGCGGCAG | | are truncated by two | |
| | (SEQ ID No. 418) | | nucleotides at the 5′ end | |
| Gluc tiling | GGGCAAAGGUCGCACAG | 478 | Note that the Cas13a spacers | 49C |
| guide 82 | CGUUGCGGCAGCC | | are truncated by two | |
| | (SEQ ID No. 419) | | nucleotides at the 5′ end | |
| Gluc tiling | GUGGAUCUUGCUGGCAA | 489 | Note that the Cas13a spacers | 49C |
| guide 83 | AGGUCGCACAGCG | | are truncated by two | |
| | (SEQ ID No. 420) | | nucleotides at the 5′ end | |
| Gluc tiling | GCACCUGGCCCUGGAUC | 499 | Note that the Cas13a spacers | 49C |
| guide 84 | UUGCUGGCAAAGG | | are truncated by two | |
| | (SEQ ID No. 421) | | nucleotides at the 5′ end | |
| Gluc tiling | GUGGCCCUGGAUCUUGC | 495 | Note that the Cas13a spacers | 49C |
| guide 85 | UGGCAAAGGUCGC | | are truncated by two | |
| | (SEQ ID No. 422) | | nucleotides at the 5′ end | |
| Gluc tiling | GUGAUCUUGUCCACCUG | 509 | Note that the Cas13a spacers | 49C |
| guide 86 | GCCCUGGAUCUUG | | are truncated by two | |
| | (SEQ ID No. 423) | | nucleotides at the 5′ end | |
| Gluc tiling | GCCCCUUGAUCUUGUCC | 514 | Note that the Cas13a spacers | 49C |
| guide 87 | ACCUGGCCCUGGA | | are truncated by two | |
| | (SEQ ID No. 424) | | nucleotides at the 5′ end | |
| Gluc tiling | GCCCUUGAUCUUGUCCA | 513 | Note that the Cas13a spacers | 49C |
| guide 88 | CCUGGCCCUGGAU | | are truncated by two | |
| | (SEQ ID No. 425) | | nucleotides at the 5′ end | |
| Gluc tiling | GCCUUGAUCUUGUCCAC | 512 | Note that the Cas13a spacers | 49C |
| guide 89 | CUGGCCCUGGAUC | | are truncated by two | |
| | (SEQ ID No. 426) | | nucleotides at the 5′ end | |
| Gluc tiling | GGCAAAGGUCGCACAGC | 477 | Note that the Cas13a spacers | 49C |
| guide 90 | GUUGCGGCAGCCA | | are truncated by two | |
| | (SEQ ID No. 427) | | nucleotides at the 5′ end | |
| Gluc tiling | GCAAAGGUCGCACAGCG | 476 | Note that the Cas13a spacers | 49C |
| guide 91 | UUGCGGCAGCCAC | | are truncated by two | |
| | (SEQ ID No. 428) | | nucleotides at the 5′ end | |
| Gluc tiling | GAAGGUCGCACAGCGUU | 474 | Note that the Cas13a spacers | 49C |
| guide 92 | GCGGCAGCCACUU | | are truncated by two | |
| | (SEQ ID No. 429) | | nucleotides at the 5′ end | |
| Gluc tiling | GAGGUCGCACAGCGUUG | 473 | Note that the Cas13a spacers | 49C |
| guide 93 | CGGCAGCCACUUC | | are truncated by two | |
| | (SEQ ID No. 430) | | nucleotides at the 5′ end | |
| Non- | GGUAAUGCCUGGCUUGU | N/A | Note that the Cas13a spacers | 49C |
| targeting | CGACGCAUAGUCUG | | are truncated by two | |
| guide 1 | (SEQ ID No. 431) | | nucleotides at the 5′ end | |
| Non- | GGGAACCUUGGCCGUUA | N/A | Note that the Cas13a spacers | 49C |
| targeting | UAAAGUCUGACCAG | | are truncated by two | |
| guide 2 | (SEQ ID No. 432) | | nucleotides at the 5′ end | |
| Non- | GGAGGGUGAGAAUUUAG | N/A | Note that the Cas13a spacers | 49C |
| targeting | AACCAAGAUUGUUG | | are truncated by two | |
| guide 3 | (SEQ ID No. 433) | | nucleotides at the 5′ end | |

TABLE 13
Guide sequences used for Cluc knockdown

| | | | | First |
|---|---|---|---|---|
| Name | Spacer sequence | Position | Notes | FIG. |
| Cluc tiling | GAGUCCUGGCAAUGAAC | 32 | Note that the Cas13a spacers are | 49D |
| guide 1 | AGUGGCGCAGUAG | | truncated by two nucleotides at | |
| | (SEQ ID No. 434) | | the 5′ end | |
| Cluc tiling | GGGUGCCACAGCUGCUA | 118 | Note that the Cas13a spacers are | 49D |
| guide 2 | UCAAUACAUUCUC | | truncated by two nucleotides at | |
| | (SEQ ID No. 435) | | the 5′ end | |
| Cluc tiling | GUUACAUACUGACACAU | 197 | Note that the Cas13a spacers are | 49D |
| guide 3 | UCGGCAACAUGUU | | truncated by two nucleotides at | |
| | (SEQ ID No. 436) | | the 5′ end | |
| Cluc tiling | GUAUGUACCAGGUUCCU | 276 | Note that the Cas13a spacers are | 49D |
| guide 4 | GGAACUGGAAUCU | | truncated by two nucleotides at | |
| | (SEQ ID No. 437) | | the 5′ end | |
| Cluc tiling | GCCUUGGUUCCAUCCAG | 350 | Note that the Cas13a spacers are | 49D |
| guide 5 | GUUCUCCAGGGUG | | truncated by two nucleotides at | |
| | (SEQ ID No. 438) | | the 5′ end | |
| Cluc tiling | GCAGUGAUGGGAUUCUC | 431 | Note that the Cas13a spacers are | 49D |
| guide 6 | AGUAGCUUGAGCG | | truncated by two nucleotides at | |
| | (SEQ ID No. 439) | | the 5′ end | |
| Cluc tiling | GAGCCUGGCAUCUCAAC | 512 | Note that the Cas13a spacers are | 49D |
| guide 7 | AACAGCGAUGGUG | | truncated by two nucleotides at | |
| | (SEQ ID No. 440) | | the 5′ end | |
| Cluc tiling | GUGUCUGGGGCGAUUCU | 593 | Note that the Cas13a spacers are | 49D |
| guide 8 | UACAGAUCUUCCU | | truncated by two nucleotides at | |
| | (SEQ ID No. 441) | | the 5′ end | |
| Cluc tiling | GCUGGAUCUGAAGUGAA | 671 | Note that the Cas13a spacers are | 49D |
| guide 9 | GUCUGUAUCUUCC | | truncated by two nucleotides at | |
| | (SEQ ID No. 442) | | the 5′ end | |
| Cluc tiling | GGCAACGUCAUCAGGAU | 747 | Note that the Cas13a spacers are | 49D |
| guide 10 | UUCCAUAGAGUGG | | truncated by two nucleotides at | |
| | (SEQ ID No. 443) | | the 5′ end | |
| Cluc tiling | GAGGCGCAGGAGAUGGU | 830 | Note that the Cas13a spacers are | 49D |
| guide 11 | GUAGUAGUAGAAG | | truncated by two nucleotides at | |
| | (SEQ ID No. 444) | | the 5′ end | |
| Cluc tiling | GAGGGACCCUGGAAUUG | 986 | Note that the Cas13a spacers are | 49D |
| guide 13 | GUAUCUUGCUUUG | | truncated by two nucleotides at | |
| | (SEQ ID No. 445) | | the 5′ end | |
| Cluc tiling | GGUAAGAGUCAACAUUC | 1066 | Note that the Cas13a spacers are | 49D |
| guide 14 | CUGUGUGAAACCU | | truncated by two nucleotides at | |
| | (SEQ ID No. 446) | | the 5′ end | |
| Cluc tiling | GACCAGAAUCUGUUUUC | 1143 | Note that the Cas13a spacers are | 49D |
| guide 15 | CAUCAACAAUGAG | | truncated by two nucleotides at | |
| | (SEQ ID No. 447) | | the 5′ end | |
| Cluc tiling | GAUGGCUGUAGUCAGUA | 1227 | Note that the Cas13a spacers are | 49D |
| guide 16 | UGUCACCAUCUUG | | truncated by two nucleotides at | |
| | (SEQ ID No. 448) | | the 5′ end | |
| Cluc tiling | GUACCAUCGAAUGGAUC | 1304 | Note that the Cas13a spacers are | 49D |
| guide 17 | UCUAAUAUGUACG | | truncated by two nucleotides at | |
| | (SEQ ID No. 449) | | the 5′ end | |
| Cluc tiling | GAGAUCACAGGCUCCUU | 1380 | Note that the Cas13a spacers are | 49D |
| guide 18 | CAGCAUCAAAAGA | | truncated by two nucleotides at | |
| | (SEQ ID No. 450) | | the 5′ end | |
| Cluc tiling | GCUUUGACCGGCGAAGA | 1461 | Note that the Cas13a spacers are | 49D |
| guide 19 | GACUAUUGCAGAG | | truncated by two nucleotides at | |
| | (SEQ ID No. 451) | | the 5′ end | |
| Cluc tiling | GCCCCUCAGGCAAUACU | 1539 | Note that the Cas13a spacers are | 49D |
| guide 20 | CGUACAUGCAUCG | | truncated by two nucleotides at | |
| | (SEQ ID No. 452) | | the 5′ end | |
| Cluc tiling | GCUGGUACUUCUAGGGU | 1619 | Note that the Cas13a spacers are | 49D |
| guide 21 | GUCUCCAUGCUUU | | truncated by two nucleotides at | |
| | (SEQ ID No. 453) | | the 5′ end | |
| Non- | GGUAAUGCCUGGCUUGU | N/A | Note that the Cas13a spacers are | 49D |
| targeting | CGACGCAUAGUCUG | | truncated by two nucleotides at | |
| guide 1 | (SEQ ID No. 454) | | the 5′ end | |
| Non- | GGGAACCUUGGCCGUUA | N/A | Note that the Cas13a spacers are | 49D |
| targeting | UAAAGUCUGACCAG | | truncated by two nucleotides at | |
| guide 2 | (SEQ ID No. 455) | | the 5′ end | |
| Non- | GGAGGGUGAGAAUUUAG | N/A | Note that the Cas13a spacers are | 49D |
| targeting | AACCAAGAUUGUUG | | truncated by two nucleotides at | |
| guide 3 | (SEQ ID No. 456) | | the 5′ end | |

TABLE 14
Guide sequences used in this study for RNA
editing in mammalian cells.
Mismatched base flips are capitalized

| | | | First |
|---|---|---|---|
| Name | Spacer sequence | Notes | FIG. |
| Tiling 30 nt 30 | gCauccugcggccucuacucugcauucaauu | Has a 5′ G for U6 | 50C |
| mismatch distance | (SEQ ID No. 457) | expression | |
| Tiling 30 nt 28 | gacCauccugcggccucuacucugcauucaa | Has a 5′ G for U6 | 50C |
| mismatch distance | (SEQ ID No. 458) | expression | |
| Tiling 30 nt 26 | gaaacCauccugcggccucuacucugcauuc | Has a 5′ G for U6 | 50C |
| mismatch distance | (SEQ ID No. 459) | expression | |
| Tiling 30 nt 24 | gcuaaacCauccugcggccucuacucugcau | Has a 5′ G for U6 | 50C |
| mismatch distance | (SEQ ID No. 460) | expression | |
| Tiling 30 nt 22 | guucuaaacCauccugcggccucuacucugc | Has a 5′ G for U6 | 50C |
| mismatch distance | (SEQ ID No. 461) | expression | |
| Tiling 30 nt 20 | guguucuaaacCauccugcggccucuacucu | Has a 5′ G for U6 | 50C |
| mismatch distance | (SEQ ID No. 462) | expression | |
| Tiling 30 nt 18 | gaauguucuaaacCauccugcggccucuacu | Has a 5′ G for U6 | 50C |
| mismatch distance | (SEQ ID No. 463) | expression | |
| Tiling 30 nt 16 | gagaauguucuaaacCauccugcggccucua | Has a 5′ G for U6 | 50C |
| mismatch distance | (SEQ ID No. 464) | expression | |
| Tiling 30 nt 14 | gauagaauguucuaaacCauccugcggccuc | Has a 5′ G for U6 | 50C |
| mismatch distance | (SEQ ID No. 465) | expression | |
| Tiling 30 nt 12 | gccauagaauguucuaaacCauccugcggcc | Has a 5′ G for U6 | 50C |
| mismatch distance | (SEQ ID No. 466) | expression | |
| Tiling 30 nt 10 | guuccauagaauguucuaaacCauccugcgg | Has a 5′ G for U6 | 50C |
| mismatch distance | (SEQ ID No. 467) | expression | |
| Tiling 30 nt 8 | gcuuuccauagaauguucuaaacCauccugc | Has a 5′ G for U6 | 50C |
| mismatch distance | (SEQ ID No. 468) | expression | |
| Tiling 30 nt 6 | gcucuuuccauagaauguucuaaacCauccu | Has a 5′ G for U6 | 50C |
| mismatch distance | (SEQ ID No. 469) | expression | |
| Tiling 30 nt 4 | gaucucuuuccauagaauguucuaaacCauc | Has a 5′ G for U6 | 50C |
| mismatch distance | (SEQ ID No. 470) | expression | |
| Tiling 30 nt 2 | ggaaucucuuuccauagaauguucuaaacCa | Has a 5′ G for U6 | 50C |
| mismatch distance | (SEQ ID No. 471) | expression | |
| Tiling 50 nt 50 | gCauccugcggccucuacucugcauucaauuaca | Has a 5′ G for U6 | 50C |
| mismatch distance | uacugacacauucggca (SEQ ID No. 472) | expression | |
| Tiling 50 nt 48 | gacCauccugcggccucuacucugcauucaauuac | Has a 5′ G for U6 | 50C |
| mismatch distance | auacugacacauucgg (SEQ ID No. 473) | expression | |
| Tiling 50 nt 46 | gaaacCauccugcggccucuacucugcauucaauu | Has a 5′ G for U6 | 50C |
| mismatch distance | acauacugacacauuc (SEQ ID No. 474) | expression | |
| Tiling 50 nt 44 | gcuaaacCauccugcggccucuacucugcauucaa | Has a 5′ G for U6 | 50C |
| mismatch distance | uuacauacugacacau (SEQ ID No. 475) | expression | |
| Tiling 50 nt 42 | guucuaaacCauccugcggccucuacucugcauu | Has a 5′ G for U6 | 50C |
| mismatch distance | caauuacauacugacac (SEQ ID No. 476) | expression | |
| Tiling 50 nt 40 | guguucuaaacCauccugcggccucuacucugca | Has a 5′ G for U6 | 50C |
| mismatch distance | uucaauuacauacugac (SEQ ID No. 477) | expression | |
| Tiling 50 nt 38 | gaauguucuaaacCauccugcggccucuacucug | Has a 5′ G for U6 | 50C |
| mismatch distance | cauucaauuacauacug (SEQ ID No. 478) | expression | |
| Tiling 50 nt 36 | gagaauguucuaaacCauccugcggccucuacuc | Has a 5′ G for U6 | 50C |
| mismatch distance | ugcauucaauuacauac (SEQ ID No. 479) | expression | |
| Tiling 50 nt 34 | gauagaauguucuaaacCauccugcggccucuac | Has a 5′ G for U6 | 50C |
| mismatch distance | ucugcauucaauuacau (SEQ ID No. 480) | expression | |
| Tiling 50 nt 32 | gccauagaauguucuaaacCauccugcggccucua | Has a 5′ G for U6 | 50C |
| mismatch distance | cucugcauucaauuac (SEQ ID No. 481) | expression | |
| Tiling 50 nt 30 | guuccauagaauguucuaaacCauccugcggccu | Has a 5′ G for U6 | 50C |
| mismatch distance | cuacucugcauucaauu (SEQ ID No. 482) | expression | |
| Tiling 50 nt 28 | gcuuuccauagaauguucuaaacCauccugcggc | Has a 5′ G for U6 | 50C |
| mismatch distance | cucuacucugcauucaa (SEQ ID No. 483) | expression | |
| Tiling 50 nt 26 | gcucuuuccauagaauguucuaaacCauccugcg | Has a 5′ G for U6 | 50C |
| mismatch distance | gccucuacucugcauuc (SEQ ID No. 484) | expression | |
| Tiling 50 nt 24 | gaucucuuuccauagaauguucuaaacCauccug | Has a 5′ G for U6 | 50C |
| mismatch distance | cggccucuacucugcau (SEQ ID No. 485) | expression | |
| Tiling 50 nt 22 | ggaaucucuuuccauagaauguucuaaacCaucc | Has a 5′ G for U6 | 50C |
| mismatch distance | ugcggccucuacucugc (SEQ ID No. 486) | expression | |
| Tiling 50 nt 20 | guggaaucucuuuccauagaauguucuaaacCau | Has a 5′ G for U6 | 50C |
| mismatch distance | ccugcggccucuacucu (SEQ ID No. 487) | expression | |
| Tiling 50 nt 18 | gacuggaaucucuuuccauagaauguucuaaacC | Has a 5′ G for U6 | 50C |
| mismatch distance | auccugcggccucuacu (SEQ ID No. 488) | expression | |
| Tiling 50 nt 16 | ggaacuggaaucucuuuccauagaauguucuaaac | Has a 5′ G for U6 | 50C |
| mismatch distance | Cauccugcggccucua (SEQ ID No. 489) | expression | |
| Tiling 50 nt 14 | guggaacuggaaucucuuuccauagaauguucuaa | Has a 5′ G for U6 | 50C |
| mismatch distance | acCauccugcggccu c(SEQ ID No. 490) | expression | |
| Tiling 50 nt 12 | gccuggaacuggaaucucuuuccauagaauguucu | Has a 5′ G for U6 | 50C |
| mismatch distance | aaacCauccugcggcc (SEQ ID No. 491) | expression | |
| Tiling 50 nt 10 | guuccuggaacuggaaucucuuuccauagaaugu | Has a 5′ G for U6 | 50C |
| mismatch distance | ucuaaacCauccugcgg (SEQ ID No. 492) | expression | |
| Tiling 50 nt 8 | ggguuccuggaacuggaaucucuuuccauagaau | Has a 5′ G for U6 | 50C |
| mismatch distance | guucuaaacCauccugc (SEQ ID No. 493) | expression | |
| Tiling 50 nt 6 | gcagguuccuggaacuggaaucucuuuccauagaa | Has a 5′ G for U6 | 50C |
| mismatch distance | uguucuaaacCauccu (SEQ ID No. 494) | expression | |
| Tiling 50 nt 4 | gaccagguuccuggaacuggaaucucuuuccauag | Has a 5′ G for U6 | 50C |
| mismatch distance | aauguucuaaacCauc (SEQ ID No. 495) | expression | |
| Tiling 50 nt 2 | gguaccagguuccuggaacuggaaucucuuuccau | Has a 5′ G for U6 | 50C |
| mismatch distance | agaauguucuaaacCa (SEQ ID No. 496) | expression | |
| Tiling 70 nt 70 | gCauccugcggccucuacucugcauucaauuaca | Has a 5′ G for U6 | 50C |
| mismatch distance | uacugacacauucggcaacauguuuuuccugguu | expression | |
| | uau (SEQ ID No. 497) | | |
| Tiling 70 nt 68 | gacCauccugcggccucuacucugcauucaauuac | Has a 5′ G for U6 | 50C |
| mismatch distance | auacugacacauucggcaacauguuuuuccugguu | expression | |
| | u (SEQ ID No. 498) | | |
| Tiling 70 nt 66 | gaaacCauccugcggccucuacucugcauucaauu | Has a 5′ G for U6 | 50C |
| mismatch distance | acauacugacacauucggcaacauguuuuuccugg | expression | |
| | u (SEQ ID No. 499) | | |
| Tiling 70 nt 64 | gcuaaacCauccugcggccucuacucugcauucaa | Has a 5′ G for U6 | 50C |
| mismatch distance | uuacauacugacacauucggcaacauguuuuuccu | expression | |
| | g (SEQ ID No. 500) | | |
| Tiling 70 nt 62 | guucuaaacCauccugcggccucuacucugcauu | Has a 5′ G for U6 | 50C |
| mismatch distance | caauuacauacugacacauucggcaacauguuuuu | expression | |
| | cc (SEQ ID No. 501) | | |
| Tiling 70 nt 60 | guguucuaaacCauccugcggccucuacucugca | Has a 5′ G for U6 | 50C |
| mismatch distance | uucaauuacauacugacacauucggcaacauguuu | expression | |
| | uu (SEQ ID No. 502) | | |
| Tiling 70 nt 58 | gaauguucuaaacCauccugcggccucuacucug | Has a 5′ G for U6 | 50C |
| mismatch distance | cauucaauuacauacugacacauucggcaacaugu | expression | |
| | uu (SEQ ID No. 503) | | |
| Tiling 70 nt 56 | gagaauguucuaaacCauccugcggccucuacuc | Has a 5′ G for U6 | 50C |
| mismatch distance | ugcauucaauuacauacugacacauucggcaacau | expression | |
| | gu (SEQ ID No. 504) | | |
| Tiling 70 nt 54 | gauagaauguucuaaacCauccugcggccucuac | Has a 5′ G for U6 | 50C |
| mismatch distance | ucugcauucaauuacauacugacacauucggcaac | expression | |
| | au (SEQ ID No. 505) | | |
| Tiling 70 nt 52 | gccauagaauguucuaaacCauccugcggccucua | Has a 5′ G for U6 | 50C |
| mismatch distance | cucugcauucaauuacauacugacacauucggcaa | expression | |
| | c (SEQ ID No. 506) | | |
| Tiling 70 nt 50 | guuccauagaauguucuaaacCauccugcggccu | Has a 5′ G for U6 | 50C |
| mismatch distance | cuacucugcauucaauuacauacugacacauucgg | expression | |
| | ca (SEQ ID No. 507) | | |
| Tiling 70 nt 48 | gcuuuccauagaauguucuaaacCauccugcggc | Has a 5′ G for U6 | 50C |
| mismatch distance | cucuacucugcauucaauuacauacugacacauuc | expression | |
| | gg (SEQ ID No. 508) | | |
| Tiling 70 nt 46 | gcucuuuccauagaauguucuaaacCauccugcg | Has a 5′ G for U6 | 50C |
| mismatch distance | gccucuacucugcauucaauuacauacugacacau | expression | |
| | uc (SEQ ID No. 509) | | |
| Tiling 70 nt 44 | gaucucuuuccauagaauguucuaaacCauccug | Has a 5′ G for U6 | 50C |
| mismatch distance | cggccucuacucugcauucaauuacauacugacac | expression | |
| | au (SEQ ID No. 510) | | |
| Tiling 70 nt 42 | ggaaucucuuuccauagaauguucuaaacCaucc | Has a 5′ G for U6 | 50C |
| mismatch distance | ugcggccucuacucugcauucaauuacauacugac | expression | |
| | ac (SEQ ID No. 511) | | |
| Tiling 70 nt 40 | guggaaucucuuuccauagaauguucuaaacCau | Has a 5′ G for U6 | 50C |
| mismatch distance | ccugcggccucuacucugcauucaauuacauacug | expression | |
| | ac (SEQ ID No. 512) | | |
| Tiling 70 nt 38 | gacuggaaucucuuuccauagaauguucuaaacC | Has a 5′ G for U6 | 50C |
| mismatch distance | auccugcggccucuacucugcauucaauuacauac | expression | |
| | ug (SEQ ID No. 513) | | |
| Tiling 70 nt 36 | ggaacuggaaucucuuuccauagaauguucuaaac | Has a 5′ G for U6 | 50C |
| mismatch distance | Cauccugcggccucuacucugcauucaauuacaua | expression | |
| | c (SEQ ID No. 514) | | |
| Tiling 70 nt 34 | guggaacuggaaucucuuuccauagaauguucuaa | Has a 5′ G for U6 | 50C |
| mismatch distance | acCauccugcggccucuacucugcauucaauuaca | expression | |
| | u (SEQ ID No. 515) | | |
| Tiling 70 nt 32 | gccuggaacuggaaucucuuuccauagaauguucu | Has a 5′ G for U6 | 50C |
| mismatch distance | aaacCauccugcggccucuacucugcauucaauua | expression | |
| | c (SEQ ID No. 516) | | |
| Tiling 70 nt 30 | guuccuggaacuggaaucucuuuccauagaaugu | Has a 5′ G for U6 | 50C |
| mismatch distance | ucuaaacCauccugcggccucuacucugcauucaa | expression | |
| | uu (SEQ ID No. 517) | | |
| Tiling 70 nt 28 | ggguuccuggaacuggaaucucuuuccauagaau | Has a 5′ G for U6 | 50C |
| mismatch distance | guucuaaacCauccugcggccucuacucugcauu | expression | |
| | caa (SEQ ID No. 518) | | |
| Tiling 70 nt 26 | gcagguuccuggaacuggaaucucuuuccauagaa | Has a 5′ G for U6 | 50C |
| mismatch distance | uguucuaaacCauccugcggccucuacucugcau | expression | |
| | uc (SEQ ID No. 519) | | |
| Tiling 70 nt 24 | gaccagguuccuggaacuggaaucucuuuccauag | Has a 5′ G for U6 | 50C |
| mismatch distance | aauguucuaaacCauccugcggccucuacucugca | expression | |
| | u (SEQ ID No. 520) | | |
| Tiling 70 nt 22 | gguaccagguuccuggaacuggaaucucuuuccau | Has a 5′ G for U6 | 50C |
| mismatch distance | agaauguucuaaacCauccugcggccucuacucu | expression | |
| | gc (SEQ ID No. 521) | | |
| Tiling 70 nt 20 | gauguaccagguuccuggaacuggaaucucuuucc | Has a 5′ G for U6 | 50C |
| mismatch distance | auagaauguucuaaacCauccugcggccucuacuc | expression | |
| | u (SEQ ID No. 522) | | |
| Tiling 70 nt 18 | gguauguaccagguuccuggaacuggaaucucuu | Has a 5′ G for U6 | 50C |
| mismatch distance | uccauagaauguucuaaacCauccugcggccucua | expression | |
| | cu (SEQ ID No. 523) | | |
| Tiling 70 nt 16 | gacguauguaccagguuccuggaacuggaaucucu | Has a 5′ G for U6 | 50C |
| mismatch distance | uuccauagaauguucuaaacCauccugcggccuc | expression | |
| | ua (SEQ ID No. 524) | | |
| Tiling 70 nt 14 | gacacguauguaccagguuccuggaacuggaaucu | Has a 5′ G for U6 | 50C |
| mismatch distance | cuuuccauagaauguucuaaacCauccugcggcc | expression | |
| | uc (SEQ ID No. 525) | | |
| Tiling 70 nt 12 | gcaacacguauguaccagguuccuggaacuggaau | Has a 5′ G for U6 | 50C |
| mismatch distance | cucuuuccauagaauguucuaaacCauccugcgg | expression | |
| | cc (SEQ ID No. 526) | | |
| Tiling 70 nt 10 | gcccaacacguauguaccagguuccuggaacugga | Has a 5′ G for U6 | 50C |
| mismatch distance | aucucuuuccauagaauguucuaaacCauccugc | expression | |
| | gg (SEQ ID No. 527) | | |
| Tiling 70 nt 8 | ggacccaacacguauguaccagguuccuggaacug | Has a 5′ G for U6 | 50C |
| mismatch distance | gaaucucuuuccauagaauguucuaaacCauccu | expression | |
| | gc (SEQ ID No. 528) | | |
| Tiling 70 nt 6 | guugacccaacacguauguaccagguuccuggaac | Has a 5′ G for U6 | 50C |
| mismatch distance | uggaaucucuuuccauagaauguucuaaacCauc | expression | |
| | cu (SEQ ID No. 529) | | |
| Tiling 70 nt 4 | gccuugacccaacacguauguaccagguuccugga | Has a 5′ G for U6 | 50C |
| mismatch distance | acuggaaucucuuuccauagaauguucuaaacCa | expression | |
| | uc (SEQ ID No. 530) | | |
| Tiling 70 nt 2 | guuccuugacccaacacguauguaccagguuccug | Has a 5′ G for U6 | 50C |
| mismatch distance | gaacuggaaucucuuuccauagaauguucuaaac | expression | |
| | Ca (SEQ ID No. 531) | | |
| Tiling 84 nt 84 | gCauccugcggccucuacucugcauucaauuaca | Has a 5′ G for U6 | 50C |
| mismatch distance | uacugacacauucggcaacauguuuuuccugguu | expression | |
| | uauuuucacacagucca (SEQ ID No. 532) | | |
| Tiling 84 nt 82 | gacCauccugcggccucuacucugcauucaauuac | Has a 5′ G for U6 | 50C |
| mismatch distance | auacugacacauucggcaacauguuuuuccugguu | expression | |
| | uauuuucacacaguc (SEQ ID No. 533) | | |
| Tiling 84 nt 80 | gaaacCauccugcggccucuacucugcauucaauu | Has a 5′ G for U6 | 50C |
| mismatch distance | acauacugacacauucggcaacauguuuuuccugg | expression | |
| | uuuauuuucacacag (SEQ ID No. 534) | | |
| Tiling 84 nt 78 | gcuaaacCauccugcggccucuacucugcauucaa | Has a 5′ G for U6 | 50C |
| mismatch distance | uuacauacugacacauucggcaacauguuuuuccu | expression | |
| | gguuuauuuucacac (SEQ ID No. 535) | | |
| Tiling 84 nt 76 | guucuaaacCauccugcggccucuacucugcauu | Has a 5′ G for U6 | 50C |
| mismatch distance | caauuacauacugacacauucggcaacauguuuuu | expression | |
| | ccugguuuauuuucac (SEQ ID No. 536) | | |
| Tiling 84 nt 74 | guguucuaaacCauccugcggccucuacucugca | Has a 5′ G for U6 | 50C |
| mismatch distance | uucaauuacauacugacacauucggcaacauguuu | expression | |
| | uuccugguuuauuuuc (SEQ ID No. 537) | | |
| Tiling 84 nt 72 | gaauguucuaaacCauccugcggccucuacucug | Has a 5′ G for U6 | 50C |
| mismatch distance | cauucaauuacauacugacacauucggcaacaugu | expression | |
| | uuuuccugguuuauuu (SEQ ID No. 538) | | |
| Tiling 84 nt 70 | gagaauguucuaaacCauccugcggccucuacuc | Has a 5′ G for U6 | 50C |
| mismatch distance | ugcauucaauuacauacugacacauucggcaacau | expression | |
| | guuuuuccugguuuau (SEQ ID No. 539) | | |
| Tiling 84 nt 68 | gauagaauguucuaaacCauccugcggccucuac | Has a 5′ G for U6 | 50C |
| mismatch distance | ucugcauucaauuacauacugacacauucggcaac | expression | |
| | auguuuuuccugguuu (SEQ ID No. 540) | | |
| Tiling 84 nt 66 | gccauagaauguucuaaacCauccugcggccucua | Has a 5′ G for U6 | 50C |
| mismatch distance | cucugcauucaauuacauacugacacauucggcaa | expression | |
| | cauguuuuuccuggu (SEQ ID No. 541) | | |
| Tiling 84 nt 64 | guuccauagaauguucuaaacCauccugcggccu | Has a 5′ G for U6 | 50C |
| mismatch distance | cuacucugcauucaauuacauacugacacauucgg | expression | |
| | caacauguuuuuccug (SEQ ID No. 542) | | |
| Tiling 84 nt 62 | gcuuuccauagaauguucuaaacCauccugcggc | Has a 5′ G for U6 | 50C |
| mismatch distance | cucuacucugcauucaauuacauacugacacauuc | expression | |
| | ggcaacauguuuuucc (SEQ ID No. 543) | | |
| Tiling 84 nt 60 | gcucuuuccauagaauguucuaaacCauccugcg | Has a 5′ G for U6 | 50C |
| mismatch distance | gccucuacucugcauucaauuacauacugacacau | expression | |
| | ucggcaacauguuuuu (SEQ ID No. 544) | | |
| Tiling 84 nt 58 | gaucucuuuccauagaauguucuaaacCauccug | Has a 5′ G for U6 | 50C |
| mismatch distance | cggccucuacucugcauucaauuacauacugacac | expression | |
| | auucggcaacauguuu (SEQ ID No. 545) | | |
| Tiling 84 nt 56 | ggaaucucuuuccauagaauguucuaaacCaucc | Has a 5′ G for U6 | 50C |
| mismatch distance | ugcggccucuacucugcauucaauuacauacugac | expression | |
| | acauucggcaacaugu (SEQ ID No. 546) | | |
| Tiling 84 nt 54 | guggaaucucuuuccauagaauguucuaaacCau | Has a 5′ G for U6 | 50C |
| mismatch distance | ccugcggccucuacucugcauucaauuacauacug | expression | |
| | acacauucggcaacau (SEQ ID No. 547) | | |
| Tiling 84 nt 52 | gacuggaaucucuuuccauagaauguucuaaacC | Has a 5′ G for U6 | 50C |
| mismatch distance | auccugcggccucuacucugcauucaauuacauac | expression | |
| | ugacacauucggcaac (SEQ ID No. 548) | | |
| Tiling 84 nt 50 | ggaacuggaaucucuuuccauagaauguucuaaac | Has a 5′ G for U6 | 50C |
| mismatch distance | Cauccugcggccucuacucugcauucaauuacaua | expression | |
| | cugacacauucggca (SEQ ID No. 549) | | |
| Tiling 84 nt 48 | guggaacuggaaucucuuuccauagaauguucuaa | Has a 5′ G for U6 | 50C |
| mismatch distance | acCauccugcggccucuacucugcauucaauuaca | expression | |
| | uacugacacauucgg (SEQ ID No. 550) | | |
| Tiling 84 nt 46 | gccuggaacuggaaucucuuuccauagaauguucu | Has a 5′ G for U6 | 50C |
| mismatch distance | aaacCauccugcggccucuacucugcauucaauua | expression | |
| | cauacugacacauuc (SEQ ID No. 551) | | |
| Tiling 84 nt 44 | guuccuggaacuggaaucucuuuccauagaaugu | Has a 5′ G for U6 | 50C |
| mismatch distance | ucuaaacCauccugcggccucuacucugcauucaa | expression | |
| | uuacauacugacacau (SEQ ID No. 552) | | |
| Tiling 84 nt 42 | ggguuccuggaacuggaaucucuuuccauagaau | Has a 5′ G for U6 | 50C |
| mismatch distance | guucuaaacCauccugcggccucuacucugcauu | expression | |
| | caauuacauacugacac (SEQ ID No. 553) | | |
| Tiling 84 nt 40 | gcagguuccuggaacuggaaucucuuuccauagaa | Has a 5′ G for U6 | 50C |
| mismatch distance | uguucuaaacCauccugcggccucuacucugcau | expression | |
| | ucaauuacauacugac (SEQ ID No. 554) | | |
| Tiling 84 nt 38 | gaccagguuccuggaacuggaaucucuuuccauag | Has a 5′ G for U6 | 50C |
| mismatch distance | aauguucuaaacCauccugcggccucuacucugca | expression | |
| | uucaauuacauacug (SEQ ID No. 555) | | |
| Tiling 84 nt 36 | gguaccagguuccuggaacuggaaucucuuuccau | Has a 5′ G for U6 | 50C |
| mismatch distance | agaauguucuaaacCauccugcggccucuacucu | expression | |
| | gcauucaauuacauac (SEQ ID No. 556) | | |
| Tiling 84 nt 34 | gauguaccagguuccuggaacuggaaucucuuucc | Has a 5′ G for U6 | 50C |
| mismatch distance | auagaauguucuaaacCauccugcggccucuacuc | expression | |
| | ugcauucaauuacau (SEQ ID No. 557) | | |
| Tiling 84 nt 32 | gguauguaccagguuccuggaacuggaaucucuu | Has a 5′ G for U6 | 50C |
| mismatch distance | uccauagaauguucuaaacCauccugcggccucua | expression | |
| | cucugcauucaauuac (SEQ ID No. 558) | | |
| Tiling 84 nt 30 | gacguauguaccagguuccuggaacuggaaucucu | Has a 5′ G for U6 | 50C |
| mismatch distance | uuccauagaauguucuaaacCauccugcggccuc | expression | |
| | uacucugcauucaauu (SEQ ID No. 559) | | |
| Tiling 84 nt 28 | gacacguauguaccagguuccuggaacuggaaucu | Has a 5′ G for U6 | 50C |
| mismatch distance | cuuuccauagaauguucuaaacCauccugcggcc | expression | |
| | ucuacucugcauucaa (SEQ ID No. 560) | | |
| Tiling 84 nt 26 | gcaacacguauguaccagguuccuggaacuggaau | Has a 5′ G for U6 | 50C |
| mismatch distance | cucuuuccauagaauguucuaaacCauccugcgg | expression | |
| | ccucuacucugcauuc (SEQ ID No. 561) | | |
| Tiling 84 nt 24 | gcccaacacguauguaccagguuccuggaacugga | Has a 5′ G for U6 | 50C |
| mismatch distance | aucucuuuccauagaauguucuaaacCauccugc | expression | |
| | ggccucuacucugcau (SEQ ID No. 562) | | |
| Tiling 84 nt 22 | ggacccaacacguauguaccagguuccuggaacug | Has a 5′ G for U6 | 50C |
| mismatch distance | gaaucucuuuccauagaauguucuaaacCauccu | expression | |
| | gcggccucuacucugc (SEQ ID No. 563) | | |
| Tiling 84 nt 20 | guugacccaacacguauguaccagguuccuggaac | Has a 5′ G for U6 | 50C |
| mismatch distance | uggaaucucuuuccauagaauguucuaaacCauc | expression | |
| | cugcggccucuacucu (SEQ ID No. 564) | | |
| Tiling 84 nt 18 | gccuugacccaacacguauguaccagguuccugga | Has a 5′ G for U6 | 50C |
| mismatch distance | acuggaaucucuuuccauagaauguucuaaacCa | expression | |
| | uccugcggccucuacu (SEQ ID No. 565) | | |
| Tiling 84 nt 16 | guuccuugacccaacacguauguaccagguuccug | Has a 5′ G for U6 | 50C |
| mismatch distance | gaacuggaaucucuuuccauagaauguucuaaac | expression | |
| | Cauccugcggccucua (SEQ ID No. 566) | | |
| Tiling 84 nt 14 | ggguuccuugacccaacacguauguaccagguucc | Has a 5′ G for U6 | 50C |
| mismatch distance | uggaacuggaaucucuuuccauagaauguucuaaa | expression | |
| | cCauccugcggccuc (SEQ ID No. 567) | | |
| Tiling 84 nt 12 | guugguuccuugacccaacacguauguaccagguu | Has a 5′ G for U6 | 50C |
| mismatch distance | ccuggaacuggaaucucuuuccauagaauguucua | expression | |
| | aacCauccugcggcc (SEQ ID No. 568) | | |
| Tiling 84 nt 10 | gccuugguuccuugacccaacacguauguaccagg | Has a 5′ G for U6 | 50C |
| mismatch distance | uuccuggaacuggaaucucuuuccauagaauguuc | expression | |
| | uaaacCauccugcgg (SEQ ID No. 569) | | |
| Tiling 84 nt 8 | ggcccuugguuccuugacccaacacguauguacca | Has a 5′ G for U6 | 50C |
| mismatch distance | gguuccuggaacuggaaucucuuuccauagaaug | expression | |
| | uucuaaacCauccugc (SEQ ID No. 570) | | |
| Tiling 84 nt 6 | gccgcccuugguuccuugacccaacacguauguac | Has a 5′ G for U6 | 50C |
| mismatch distance | cagguuccuggaacuggaaucucuuuccauagaau | expression | |
| | guucuaaacCauccu (SEQ ID No. 571) | | |
| Tiling 84 nt 4 | gcgccgcccuugguuccuugacccaacacguaugu | Has a 5′ G for U6 | 50C |
| mismatch distance | accagguuccuggaacuggaaucucuuuccauaga | expression | |
| | auguucuaaacCauc (SEQ ID No. 572) | | |
| Tiling 84 nt 2 | ggucgccgcccuugguuccuugacccaacacguau | Has a 5′ G for U6 | 50C |
| mismatch distance | guaccagguuccuggaacuggaaucucuuuccaua | expression | |
| | gaauguucuaaacCa (SEQ ID No. 573) | | |
| ADAR non-targeting | GUAAUGCCUGGCUUGUCGACGCA | Has a 5′ G for U6 | 50C |
| guide | UAGUCUG (SEQ ID No. 574) | expression | |
| PFS binding screen | gaaaacgcagguuccucCaguuucgggagcagcg | Has a 5′ G for U6 | 51B |
| guide for TAG motif | cacgucucccuguaguc (SEQ ID No. 575) | expression | |
| PFS binding screen | gacgcagguuccucuagCuucgggagcagcgcac | Has a 5′ G for U6 | 51B |
| guide for AAC motif | gucucccuguagucaag (SEQ ID No. 576) | expression | |
| PFS binding screen | GUAAUGCCUGGCUUGUCGACGCA | Has a 5′ G for U6 | 51B |
| non-targeting | UAGUCUG (SEQ ID No. 577) | expression | |
| Motif preference | gauagaauguucuaaacCauccugcggccucuac | Has a 5′ G for U6 | 51C |
| targeting guide | ucugcauucaauuacau (SEQ ID No. 578) | expression | |
| Motif preference non- | GUAAUGCCUGGCUUGUCGACGCA | Has a 5′ G for U6 | 51C |
| targeting guide | UAGUCUG (SEQ ID No. 579) | expression | |
| PPIB tiling guide 50 | gCaaggccacaaaauuauccacuguuuuuggaaca | Has a 5′ G for U6 | 57D |
| mismatch distance | gucuuuccgaagagac (SEQ ID No. 580) | expression | |
| PPIB tiling guide 42 | gccuguagcCaaggccacaaaauuauccacuguuu | Has a 5′ G for U6 | 57D |
| mismatch distance | uuggaacagucuuucc (SEQ ID No. 581) | expression | |
| PPIB tiling guide 34 | gcuuucucuccuguagcCaaggccacaaaauuauc | Has a 5′ G for U6 | 57D |
| mismatch distance | cacuguuuuuggaaca (SEQ ID No. 582) | expression | |
| PPIB tiling guide 26 | ggccaaauccuuucucuccuguagcCaaggccaca | Has a 5′ G for U6 | 57D |
| mismatch distance | aaauuauccacuguuu (SEQ ID No. 583) | expression | |
| PPIB tiling guide 18 | guuuuuguagccaaauccuuucucuccuguagcC | Has a 5′ G for U6 | 57D |
| mismatch distance | aaggccacaaaauuauc (SEQ ID No. 584) | expression | |
| PPIB tiling guide 10 | gauuugcuguuuuuguagccaaauccuuucucuc | Has a 5′ G for U6 | 57D |
| mismatch distance | cuguagcCaaggccaca (SEQ ID No. 585) | expression | |
| PPIB tiling guide 2 | gacgauggaauuugcuguuuuuguagccaaaucc | Has a 5′ G for U6 | 57D |
| mismatch distance | uuucucuccuguagcCa (SEQ ID No. 586) | expression | |
| Targeting guide, | gauagaauguucuaaacGauccugcggccucuac | Has a 5′ G for U6 | 57D |
| opposite base G | ucugcauucaauuacau (SEQ ID No. 587) | expression | |
| Targeting guide, | gauagaauguucuaaacAauccugcggccucuac | Has a 5′ G for U6 | 57D |
| opposite base A | ucugcauucaauuacau (SEQ ID No. 588) | expression | |
| Targeting guide, | gauagaauguucuaaacUauccugcggccucuac | Has a 5′ G for U6 | 57D |
| opposite base C | ucugcauucaauuacau (SEQ ID No. 589) | expression | |
| AVPR2 guide 37 | ggucccacgcggccCacagcugcaccaggaagaag | Has a 5′ G for U6 | 52A |
| mismatch distance | ggugcccagcacagca (SEQ ID No. 590) | expression | |
| AVPR2 guide 35 | ggggucccacgcggccCacagcugcaccaggaaga | Has a 5′ G for U6 | 52A |
| mismatch distance | agggugcccagcacag (SEQ ID No. 591) | expression | |
| AVPR2 guide 33 | gccgggucccacgcggccCacagcugcaccaggaa | Has a 5′ G for U6 | 52A |
| mismatch distance | gaagggugcccagcac (SEQ ID No. 592) | expression | |
| FANCC guide 37 | gggugaugacauccCaggcgaucguguggccucc | Has a 5′ G for U6 | 52B |
| mismatch distance | aggagcccagagcagga (SEQ ID No. 593) | expression | |
| FANCC guide 35 | gagggugaugacauccCaggcgaucguguggccu | Has a 5′ G for U6 | 52B |
| mismatch distance | ccaggagcccagagcag (SEQ ID No. 594) | expression | |
| FANCC guide 32 | gaucagggugaugacauccCaggcgaucgugugg | Has a 5′ G for U6 | 52B |
| mismatch distance | ccuccaggagcccagag (SEQ ID No. 595) | expression | |
| Synthetic disease gene | gguggcuccauucacucCaaugcugagcacuucc | Has a 5′ G for U6 | 52E |
| target IL2RG | acagaguggguuaaagc (SEQ ID No. 596) | expression | |
| Synthetic disease gene | guuucuaauauauuuugCcagacugauggacuau | Has a 5′ G for U6 | 52E |
| target F8 | ucucaauuaauaaugau (SEQ ID No. 597) | expression | |
| Synthetic disease gene | gagauguugcuguggauCcaguccacagccagcc | Has a 5′ G for U6 | 52E |
| target LDLR | cgucgggggccuggaug (SEQ ID No. 598) | expression | |
| Synthetic disease gene | gcaggccggcccagcugCcaggugcaccugcucg | Has a 5′ G for U6 | 52E |
| target CBS | gagcaucgggccggauc (SEQ ID No. 599) | expression | |
| Synthetic disease gene | gcaaagaaccucuggguCcaaggguagaccaccag | Has a 5′ G for U6 | 52E |
| target HBB | cagccugcccagggcc (SEQ ID No. 600) | expression | |
| Synthetic disease gene | gaagagaaacuuaguuuCcagggcuuugguagag | Has a 5′ G for U6 | 52E |
| target ALDOB | ggcaaagguugauagca (SEQ ID No. 601) | expression | |
| Synthetic disease gene | gucagccuagugcagagCcacugguaguuggugg | Has a 5′ G for U6 | 52E |
| target DMD | uuagaguuucaaguucc (SEQ ID No. 602) | expression | |
| Synthetic disease gene | ggcucauugugaacaggCcaguaauguccgggau | Has a 5′ G for U6 | 52E |
| target SMAD4 | ggggcggcauaggcggg (SEQ ID No. 603) | expression | |
| Synthetic disease gene | guagcuaaagaacuugaCcaagacauaucaggauc | Has a 5′ G for U6 | 52E |
| target BRCA2 | caccucagcuccuaga (SEQ ID No. 604) | expression | |
| Synthetic disease gene | ggggcauuguucugugcCcaguccugcugguaga | Has a 5′ G for U6 | 52E |
| target GRIN2A | ccugcuccccgguggcu (SEQ ID No. 605) | expression | |
| Synthetic disease gene | gagaagucguucaugugCcaccgugggagcguac | Has a 5′ G for U6 | 52E |
| target SCN9A | agucaucauugaucuug (SEQ ID No. 606) | expression | |
| Synthetic disease gene | gggauuaaugcugaacgCaccaaaguucaucccac | Has a 5′ G for U6 | 52E |
| target TARDBP | cacccauauuacuacc (SEQ ID No. 607) | expression | |
| Synthetic disease gene | gcuccaaaggcuuuccuCcacuguugcaaaguua | Has a 5′ G for U6 | 52E |
| target CFTR | uugaaucccaagacaca (SEQ ID No. 608) | expression | |
| Synthetic disease gene | gaugaaugaacgauuucCcagaacucccuaaucag | Has a 5′ G for U6 | 52E |
| target UBE3A | aacagagucccuggua (SEQ ID No. 609) | expression | |
| Synthetic disease gene | ggagccucugccggagcCcagagaacccgagaguc | Has a 5′ G for U6 | 52E |
| target SMPD1 | agacagagccagcgcc (SEQ ID No. 610) | expression | |
| Synthetic disease gene | ggcuuccguggagacacCcaaucaauuugaagag | Has a 5′ G for U6 | 52E |
| target USH2A | aucuugaagugaugcca (SEQ ID No. 611) | expression | |
| Synthetic disease gene | gugggacugcccuccucCcauuugcagaugccgu | Has a 5′ G for U6 | 52E |
| target MEN1 | cguagaaucgcagcagg (SEQ ID No. 612) | expression | |
| Synthetic disease gene | gcuucuucaauaguucuCcagcuacacuggcagg | Has a 5′ G for U6 | 52E |
| target C8orf37 | cauaugcccguguuccu (SEQ ID No. 613) | expression | |
| Synthetic disease gene | gauuccuuuucuucgucCcaauucaccucagugg | Has a 5′ G for U6 | 52E |
| target MLH1 | cuagucgaagaaugaag (SEQ ID No. 614) | expression | |
| Synthetic disease gene | gcagcuucagcaccuucCagucagacuccugcuuc | Has a 5′ G for U6 | 52E |
| target TSC2 | aagcacugcagcagga (SEQ ID No. 615) | expression | |
| Synthetic disease gene | gccauuugcuugcagugCcacuccagaggauucc | Has a 5′ G for U6 | 52E |
| target NF1 | ggauugccauaaauacu (SEQ ID No. 616) | expression | |
| Synthetic disease gene | guucaauaguuuuggucCaguaucguuuacagcc | Has a 5′ G for U6 | 52E |
| target MSH6 | cuucuugguagauuuca (SEQ ID No. 617) | expression | |
| Synthetic disease gene | ggcaaccgucuucugacCaaauggcagaacauuu | Has a 5′ G for U6 | 52E |
| target SMN1 | guccccaacuuuccacu (SEQ ID No. 618) | expression | |
| Synthetic disease gene | gcgacuuuccaaugaacCacugaagcccagguaug | Has a 5′ G for U6 | 52E |
| target SH3TC2 | acaaagccgaugaucu (SEQ ID No. 619) | expression | |
| Synthetic disease gene | guuuacacucaugcuucCacagcuuuaacagauca | Has a 5′ G for U6 | 52E |
| target DNAH5 | uuugguuccuugauga (SEQ ID No. 620) | expression | |
| Synthetic disease gene | gcuuaagcuuccgugucCagccuucaggcagggu | Has a 5′ G for U6 | 52E |
| target MECP2 | ggggucaucauacaugg (SEQ ID No. 621) | expression | |
| Synthetic disease gene | ggacagcugggcugaucCaugaugucauccagaa | Has a 5′ G for U6 | 52E |
| target ADGRV1 | acacuggggacccucag (SEQ ID No. 622) | expression | |
| Synthetic disease gene | gucucaucucaacuuucCauauccguaucaugga | Has a 5′ G for U6 | 52E |
| target AHI1 | aucauagcauccuguaa (SEQ ID No. 623) | expression | |
| Synthetic disease gene | gcaugcagacgcgguucCacucgcagccacaguuc | Has a 5′ G for U6 | 52E |
| target PRKN | cagcaccacucgagcc (SEQ ID No. 624) | expression | |
| Synthetic disease gene | guugguuagggucaaccCaguauucuccacucuu | Has a 5′ G for U6 | 52E |
| target COL3A1 | gaguucaggauggcaga (SEQ ID No. 625) | expression | |
| Synthetic disease gene | gcuacacuguccaacacCcacucucgggucaccac | Has a 5′ G for U6 | 52E |
| target BRCA1 | aggugccucacacauc (SEQ ID No. 626) | expression | |
| Synthetic disease gene | gcugcacuguguaccccCagagcuccguguugcc | Has a 5′ G for U6 | 52E |
| target MYBPC3 | gacauccugggguggcu (SEQ ID No. 627) | expression | |
| Synthetic disease gene | gagcuuccugccacuccCaacagguuucacaguaa | Has a 5′ G for U6 | 52E |
| target APC | gcgcguaucuguucca (SEQ ID No. 628) | expression | |
| Synthetic disease gene | gacggcaagagcuuaccCagucacuuguguggag | Has a 5′ G for U6 | 52E |
| target BMPR2 | acuuaaauacuugcaua (SEQ ID No. 629) | expression | |
| KRAS tiling guide 50 | gCaaggccacaaaauuauccacuguuuuuggaaca | Has a 5′ G for U6 | 53A |
| mismatch distance | gucuuuccgaagagac (SEQ ID No. 630) | expression | |
| KRAS tiling guide 42 | gccuguagcCaaggccacaaaauuauccacuguuu | Has a 5′ G for U6 | 53A |
| mismatch distance | uuggaacagucuuucc (SEQ ID No. 631) | expression | |
| KRAS tiling guide 34 | gcuuucucuccuguagcCaaggccacaaaauuauc | Has a 5′ G for U6 | 53A |
| mismatch distance | cacuguuuuuggaaca (SEQ ID No. 632) | expression | |
| KRAS tiling guide 26 | ggccaaauccuuucucuccuguagcCaaggccaca | Has a 5′ G for U6 | 53A |
| mismatch distance | aaauuauccacuguuu (SEQ ID No. 633) | expression | |
| KRAS tiling guide 18 | guuuuuguagccaaauccuuucucuccuguagcC | Has a 5′ G for U6 | 53A |
| mismatch distance | aaggccacaaaauuauc (SEQ ID No. 634) | expression | |
| KRAS tiling guide 10 | gauuugcuguuuuuguagccaaauccuuucucuc | Has a 5′ G for U6 | 53A |
| mismatch distance | cuguagcCaaggccaca (SEQ ID No. 635) | expression | |
| KRAS tiling guide 2 | gacgauggaauuugcuguuuuuguagccaaaucc | Has a 5′ G for U6 | 53A |
| mismatch distance | uuucucuccuguagcCa (SEQ ID No. 636) | expression | |
| KRAS tiling non- | GUAAUGCCUGGCUUGUCGACGCA | Has a 5′ G for U6 | 53A |
| targeting guide | UAGUCUG (SEQ ID No. 637) | expression | |
| Luciferase W85X | gauagaauguucuaaacCauccugcggccucuac | Has a 5′ G for U6 | 53B |
| targeting guide for | ucugcauucaauuacau (SEQ ID No. 638) | expression | |
| transcriptome | | | |
| specificity | | | |
| Non-targeting guide | GCAGGGUUUUCCCAGUCACGACG | Has a 5′ G for U6 | 53C |
| for transcriptome | UUGUAAAGUUG (SEQ ID No. 639) | expression | |
| specificity | | | |
| endogenous KRAS | gucaaggcacucuugccCacgccaccagcuccaac | Has a 5′ G for U6 | 54F |
| guide 2 | uaccacaaguuuauau (SEQ ID No. 640) | expression | |
| endogenous PPIB | gcaaagaucacccggccCacaucuucaucuccaau | Has a 5′ G for U6 | 54G |
| guide 1 | ucguaggucaaaauac (SEQ ID No. 641) | expression | |
| endogenous KRAS | GcgccaccagcuccaacCaccacaaguuuauauuc | Has a 5′ G for U6 | 54F |
| guide 1 | agucauuuucagcagg (SEQ ID No. 642) | expression | |
| endogenous KRAS | GuuucuccaucaauuacCacuugcuuccuguagg | Has a 5′ G for U6 | 54F |
| guide 3 | aauccucuauuGUugga (SEQ ID No. 643) | expression | |
| endogenous PPIB | GcuuucucuccuguagcCaaggccacaaaauuau | Has a 5′ G for U6 | 54G |
| guide 2 | ccacuguuuuuggaaca (SEQ ID No. 644) | expression | |
| endogenous non- | GUAAUGCCUGGCUUGUCGACGCA | Has a 5′ G for U6 | 54F |
| targeting guide | UAGUCUG (SEQ ID No. 645) | expression | |
| BoxB Cluc guide | ucuuuccauaGGCCCUGAAAAAGGGC | Has a 5′ G for U6 | 62B |
| | CuguucuaaacCauccugcggccucuacucGGC | expression | |
| | CCUGAAAAAGGGCCauucaauuac | | |
| | (SEQ ID No. 646) | | |
| BoxB non-targeting | cagcuggcgaGGCCCUGAAAAAGGGC | Has a 5′ G for U6 | 62B |
| guide | CggggaugugcCgcaaggcgauuaaguuggGG | expression | |
| | CCCUGAAAAAGGGCCacgccagggu | | |
| | (SEQ ID No. 647) | | |
| Stafforst full length | GUGGAAUAGUAUAACAAUAUGCU | Has a 5′ G for U6 | 62C |
| ADAR2 guide 1 | AAAUGUUGUUAUAGUAUCCCACu | expression | |
| | cuaaaCCAuccugcgGGGCCCUCUUCA | | |
| | GGGCCC (SEQ ID No. 648) | | |
| Stafforst full length | GUGGAAUAGUAUAACAAUAUGCU | Has a 5′ G for U6 | 62C |
| ADAR2 non-targeting | AAAUGUUGUUAUAGUAUCCCACac | expression | |
| guide | ccuggcguuacccaGGGCCCUCUUCAGG | | |
| | GCCC (SEQ ID No. 649) | | |

### REFERENCES

[1189] 1. P. D. Hsu, E. S. Lander, F. Zhang, Development and applications of CRISPR-Cas9 for genome engineering. Cell 157, 1262-1278 (2014).
[1190] 2. A. C. Komor, A. H. Badran, D. R. Liu, CRISPR-Based Technologies for the Manipulation of Eukaryotic Genomes. Cell 168, 20-36 (2017).
[1191] 3. L. Cong et al., Multiplex genome engineering using CRISPR/Cas systems. Science 339, 819-823 (2013).
[1192] 4. P. Mali et al., RNA-guided human genome engineering via Cas9. Science 339, 823-826 (2013).
[1193] 5. B. Zetsche et al., Cpfl is a single RNA-guided endonuclease of a class 2 CRISPR-Cas system. Cell 163, 759-771 (2015).
[1194] 6. H. Kim, J. S. Kim, A guide to genome engineering with programmable nucleases. Nat Rev Genet 15, 321-334 (2014).
[1195] 7. A. C. Komor, Y. B. Kim, M. S. Packer, J. A. Zuris, D. R. Liu, Programmable editing of a target base in genomic DNA without double-stranded DNA cleavage. Nature 533, 420-424 (2016).
[1196] 8. K. Nishida et al., Targeted nucleotide editing using hybrid prokaryotic and vertebrate adaptive immune systems. Science 353, (2016).
[1197] 9. Y. B. Kim et al., Increasing the genome-targeting scope and precision of base editing with engineered Cas9-cytidine deaminase fusions. Nat Biotechnol 35, 371-376 (2017).
[1198] 10. O. O. Abudayyeh et al., C2c2 is a single-component programmable RNA-guided RNA-targeting CRISPR effector. Science 353, aaf5573 (2016).
[1199] 11. S. Shmakov et al., Discovery and Functional Characterization of Diverse Class 2 CRISPR-Cas Systems. Mol Cell 60, 385-397 (2015).
[1200] 12. S. Shmakov et al., Diversity and evolution of class 2 CRISPR-Cas systems. Nat Rev Microbiol 15, 169-182 (2017).
[1201] 13. A. A. Smargon et al., Cas13b Is a Type VI-B CRISPR-Associated RNA-Guided RNase Differentially Regulated by Accessory Proteins Csx27 and Csx28. Mol Cell 65, 618-630 e617 (2017).
[1202] 14. J. S. Gootenberg et al., Nucleic acid detection with CRISPR-Cas13a/C2c2. Science 356, 438-442 (2017).
[1203] 15. O. O. Abudayyeh et al., RNA targeting with CRISPR-Cas13a. Nature in press, (2017).
[1204] 16. K. Nishikura, Functions and regulation of RNA editing by ADAR deaminases. Annu Rev Biochem 79, 321-349 (2010).
[1205] 17. M. H. Tan et al., Dynamic landscape and regulation of RNA editing in mammals. Nature 550, 249-254 (2017)
[1206] 18. B. L. Bass, H. Weintraub, An unwinding activity that covalently modifies its double-stranded RNA substrate. Cell 55, 1089-1098 (1988).
[1207] 19. M. M. Matthews et al., Structures of human ADAR2 bound to dsRNA reveal base-flipping mechanism and basis for site selectivity. Nat Struct Mol Biol 23, 426-433 (2016).
[1208] 20. Y. Zheng, C. Lorenzo, P. A. Beal, DNA editing in DNA/RNA hybrids by adenosine deaminases that act on RNA. Nucleic Acids Res 45, 3369-3377 (2017).
[1209] 21. A. Kuttan, B. L. Bass, Mechanistic insights into editing-site specificity of ADARs. Proc Natl Acad Sci USA 109, E3295-3304 (2012).
[1210] 22. S. K. Wong, S. Sato, D. W. Lazinski, Substrate recognition by ADAR1 and ADAR2. RNA 7, 846-858 (2001).
[1211] 23. M. Fukuda et al., Construction of a guide-RNA for site-directed RNA mutagenesis utilising intracellular A-to-I RNA editing. Sci Rep 7, 41478 (2017).
[1212] 24. M. F. Montiel-Gonzalez, I. Vallecillo-Viejo, G. A. Yudowski, J. J. Rosenthal, Correction of mutations within the cystic fibrosis transmembrane conductance regulator by site-directed RNA editing. Proc Natl Acad Sci USA 110, 18285-18290 (2013).
[1213] 25. M. F. Montiel-Gonzalez, I. C. Vallecillo-Viejo, J. J. Rosenthal, An efficient system for selectively altering genetic information within mRNAs. Nucleic Acids Res 44, e157 (2016).
[1214] 26. J. Wettengel, P. Reautschnig, S. Geisler, P. J. Kahle, T. Stafforst, Harnessing human ADAR2 for RNA repair—Recoding a PINK1 mutation rescues mitophagy. Nucleic Acids Res 45, 2797-2808 (2017).
[1215] 27. Y. Wang, J. Havel, P. A. Beal, A Phenotypic Screen for Functional Mutants of Human Adenosine Deaminase Acting on RNA 1. ACS Chem Biol 10, 2512-2519 (2015).
[1216] 28. K. A. Lehmann, B. L. Bass, Double-stranded RNA adenosine deaminases ADAR1 and ADAR2 have overlapping specificities. Biochemistry 39, 12875-12884 (2000).
[1217] 29. T. Stafforst, M. F. Schneider, An RNA-deaminase conjugate selectively repairs point mutations. Angew Chem Int Ed Engl 51, 11166-11169 (2012).
[1218] 30. C. Ballatore, V. M. Lee, J. Q. Trojanowski, Tau-mediated neurodegeneration in Alzheimer's disease and related disorders. Nat Rev Neurosci 8, 663-672 (2007).
[1219] 31. Y. Li et al., Carriers of rare missense variants in IFIH1 are protected from psoriasis. J Invest Dermatol 130, 2768-2772 (2010).
[1220] 32. R. S. Finkel et al., Treatment of infantile-onset spinal muscular atrophy with nusinersen: a phase 2, open-label, dose-escalation study. Lancet 388, 3017-3026 (2016).
[1221] 33. J. Joung et al., Genome-scale CRISPR-Cas9 knockout and transcriptional activation screening. Nat Protoc 12, 828-863 (2017).
[1222] 34. B. Li, C. N. Dewey, RSEM: accurate transcript quantification from RNA-Seq data with or without a reference genome. BMC Bioinformatics 12, 323 (2011).
[1223] 35. E. Picardi, A. M. D'Erchia, A. Montalvo, G. Pesole, Using REDItools to Detect RNA Editing Events in NGS Datasets. Curr Protoc Bioinformatics 49, 12 12 11-15 (2015).
[1224] 36. E. Picardi, G. Pesole, REDItools: high-throughput RNA editing detection made easy. Bioinformatics 29, 1813-1814 (2013).
[1225] 37. G. Glusman, J. Caballero, D. E. Mauldin, L. Hood, J. C. Roach, Kaviar: an accessible system for testing SNV novelty. Bioinformatics 27, 3216-3217 (2011).
[1226] 38. J. D. Watson, Molecular biology of the gene. (Pearson, Boston, ed. Seventh edition, 2014), pp. xxxiv, 872 pages.
[1227] 39. R. C. Ferreira et al., Association of IFIH1 and other autoimmunity risk alleles with selective IgA deficiency. Nat Genet 42, 777-780 (2010).

### Example 4

[1228] P53 plays an essential role in regulation of many cellular processes including cell cycle control, apoptosis, DNA repair, senescence, and metabolism. The gene encoding p53, TP53, is mutated or deleted in about 50% of human cancers, making it the most significant tumor suppressor. MDM2 and MDMX (also known as MDM4) are well-known negative regulators of p53. The genes encoding these two factors are often overexpressed in human cancer, especially in TP53 wild-type tumors, as a result of gene amplification or other regulatory mechanism. As the p53-MDM2/MDMX pathway is dysregulated in wide range of human cancers, it is of considerable interest to targeting the two negative regulators of p53, i.e. MDM2 and MDMX, as a therapeutic strategy for human cancers.

[1229] Applicant performed CRISPR-Cas9 genome-wide loss of function screen on one diffuse large B cell lymphoma (DLBCL) cell line. Applicant showed that p53 degradation plays the central role in cell survival. Depletion of the p53 negative regulator, MDM2, inhibits the lymphoma cell survival. In addition, the oncogenic and cell cycle-regulatory protein kinase, polo-like kinase 1 (PLK1), which regulate MDM2 function through phosphorylation, was also identified as one of the top hits that promote lymphoma cell survival. These top hits of the CRISPR-Cas9 screen, including MDM2 and PLK1, have been validated by single-knockout experiments. Small molecules that can target PLK1 and MDM2 have been developed, for instance Volasertib and Nutlin-3, however, these drugs have very high toxicity for patients which thus limits the use of these drugs in clinical practice. As MDM2 function is regulated by ATM-, PLK1- or SGK1-mediated phosphorylation, targeting the critical phosphorylation sites for MDM2 by RNA editing could therefore be an alternative therapeutic strategy that would disrupt the MDM2-mediated oncogenic signaling, yet with reduced toxicity. Here, we plan to use the REPAIR systems to precisely target important oncogenic phosphorylation sites in MDM2, which will result in loss of function of the protein and lead to killing of the lymphoma cells.

[1230] Inhibition of the interaction between p53 and MDM2 may result in the emergence of TP53 mutation, which eventually lead to resistance of MDM2 inhibitors. Thus, simultaneously targeting a TP53 independent oncogenic pathway, may lead to a longer and better anti-tumor effect. This could be achieved by editing additional phosphorylation sites on genes belong to different signalling pathways, or by combine the MDM2 targeting strategy with other available therapies, such as chemotherapy, small molecules targeting the other kinases, such as BTK, PI3K, AKT and JAK3. A similar strategy can be used to target other important oncogenic phosphorylation in lymphomas as well as in other type of cancers.

[1231] The Cas13α-ADAR system (REPAIR) can be used to test phosphorylation targets in cell lines. Tumor cells lines are well known in the art (see, e.g, NCI-60, dtp.cancer.gov/discovery_development/nci-60/cell_list.htm). Cancer cell lines may be obtained commercially (e.g., from the American Type Culture Collection, Rockville, Md.). In the present invention, Applicants tested tumor cell viability by targeting phosphorylation sites with REPAIR in a diffuse large B cell lymphoma (DLBCL) cell line. Applicants tested different guide sequences and phosphorylation site targets for tumor cell viability.

[1232] In certain embodiments, the present invention is used in a cancer mouse model. Murine models have been adopted as a significant and powerful tool in the study of cancer. The applications of murine models of cancer are numerous: mechanism discovery, oncogenesis, molecular genetics, microenvironment, metastasis, and therapeutic efficacy. In certain embodiments, DLBCL cells are transplanted into nude mice. In certain embodiments, the cells are administered the REPAIR complex before transplantation and tumor growth is monitored. In certain embodiments, the cells are transplanted into the mice and the tumor is allowed to grow. The REPAIR complex is then administered to the tumor and tumor growth is monitored.

[1233] Use of mouse models has been described (see, e.g., Kohnken et al., Overview of the Use of Murine Models in Leukemia and Lymphoma Research, Front Oncol. 2017; 7: 22). Xenograft models can be used to investigate tumor biology. Human tumor tissue or tumor-derived cell lines are transplanted subcutaneously, intravenously, or orthotopically into the organ type of origin. These models are conducted in immunocompromised mice to avoid immune rejection of the human cells.

[1234] Immunocompromised mice range from athymic nude to variations on severe combined immunodeficiency (SCID) mice. Nude mice are generated on BALB/c background utilizing a mutation in Foxnl resulting in the lack of thymic development, and therefore thymus-derived mature T cells. Importantly, these mice still carry B cells, granulocytes, dendritic cells, and highly active NK cells. SCID mice are typically APrkdc and Rag1 null, derived on a C57BL/6, C3H, or non-obese diabetic/LtSzJ backgrounds. These mutations result in the lack of functioning B and T cells with minimal to no NK activity. Certain commercially available NOD/SCID strains are also somewhat resistant to the development of spontaneous lymphoma. Xenograft models are highly useful in determining in vivo proof-of-concept from in vitro studies as well as examining the efficacy of therapeutics on human tumor cells. Their disadvantages, however, include a general lack of tumor context or microenvironment (partially improved by orthotopic models), and inability to determine the effects of immune systems on tumor growth. NSG™ mice are further immunocompromised with an IL2Rγ knockout, rendering these mice deficient in all lymphocytes, including NK cells, making these mice more receptive to engraftment. NOD/SCID mice can be “humanized” by the addition of human peripheral blood lymphocytes, bone marrow, or fetal liver and thymus into irradiated or immunodeficient mice. This manipulation allows for nearly complete reconstitution of immune responses to engrafted tumors.

[1235] B-cell lymphomas are the fourth most common hematologic malignancy in humans and the most common type of non-Hodgkin's lymphoma. The most common B-cell lymphomas are diffuse large B-cell lymphoma (DLBCL), follicular lymphomas (FLs), marginal zone lymphomas, and Burkitt's lymphoma (BL) (see, e.g., Donnou S, et al., Murine models of B-cell lymphomas: promising tools for designing cancer therapies. Adv Hematol (2012)). Murine models of lymphoma have allowed the study of tumor biology, microenvironment, and mechanisms of response to therapy.

[1236] Translocation of the MYC oncogene to a site downstream of a B-cell specific enhancer or promoter region results in B-cell lymphoma. The transgenic murine model Eμ-MYC features MYC gene insertion into the IgH locus with a 100% incidence of B-cell lymphoma developing. This model features development of an immature form resembling BL and a more indolent mature form resembling DLBCL. Modification of similar models by an introduction of murine retroviruses expressing ras oncogene can be used to produce accelerated lymphomagenesis.

[1237] In certain embodiments, REPAIR is used to target phosphorylation sites in a mouse model selected from (i) syngeneic murine models, (ii) syngeneic models with murine tumor cells engineered to express human antigens, (iii) human cells implanted into immunodeficient mice, and (iv) humanized mice, that is immunodeficient mice reconstituted with human immune system and then implanted with human tumor cells. In certain embodiments, at 7-9 weeks of age, mice are injected with about 2.5×106 tumor cells. In certain embodiments, lymphoma cells are implanted into 8- to 10-week-old female BALB/c mice at a dose of about 5×106 cells by the subcutaneous route into 2 separate sites on the right and left side of the abdomen. In certain embodiments, treatment can be administered when tumors reach 5 mm to 7 mm in largest diameter, which typically occurs at days 5 to 7 after tumor inoculation.

### Example 5—Genetic Landscape of Hepatitis B Virus-Associated Diffuse Large B-Cell Lymphoma

[1238] Diffuse large B-cell lymphoma (DLBCL), is one of the most common lymphoid malignancies, accounting for 30-40% of non-Hodgkin lymphomas (NHL). Based on gene expression profiling, two major molecular subtypes with different chromosomal alterations and clinical outcomes have been identified, germinal center B-cell-like (GCB) and activated B-cell-like (ABC) subtypes1. Based on the latest 2016 WHO classification, additional DLBCL associated subtypes have been defined, such as large B-cell lymphoma with IRF4 rearrangement, high-grade B-cell lymphoma with MYC, BCL2 and/or BCL6 translocations and Epstein-Barr virus (EBV)-positive DLBCL2. These new entities highlight that specific chromosomal alterations or infectious agents are associated with different clinical manifestations. Further classification/subtyping of DLBCLs based on genetic characterizations is expected to have a significant impact on etiological studies, clinical management and development of new therapeutic strategies for these patients.

[1239] Several studies, including the most recent one on 1001 patients, have explored the genome of DLBCL by using next-generation sequencing technologies3-11. These studies have revealed recurrently occurring somatic mutations or structural variants that affect multiple cellular processes or signaling pathways, including apoptosis (TP53), B-cell receptor (BCR) and nuclear factor kappa B (NF-κB) signaling (CARD11, CD79B, LYN, MYD88 and TNFAIP3), epigenetic modifications (CREBBP, EZH2, KMT2D/MLL2 and SPEN), immune regulation/evasion (B2M, CIITA, CD58, TNFRSF14 and CD274), cell migration (GNA13) and expression of proto-oncogenes (BCL2, BCL6, MYC and REL). However, the somatic mutation spectrums identified differ somewhat in the published patient cohorts and the overlap in the mutated genes is limited between these studies7,8,12, which may reflect a very high genetic heterogeneity in DLBCL. Of note, the ethnic background seems to influence the mutational spectra, where some potential cancer-driver genes, such as BTG2, CD70, CXCR4, DTX1, LYN and TMSB4X, were exclusively or highly mutated in Chinese DLBCL patients8,13. The genomic changes in DLBCL may also be affected by the age of patients14, alterations in DNA repair genes15, exposure to different etiological agents16, and/or autoimmune/inflammatory immune responses17.

[1240] Infectious agents play a key role in the development of certain type of cancers, of which viral etiologies contribute to approximately 15-20% of all human cancers. Specific oncogenic pathways such as the NF-κB, anti-apoptotic and β53-related signaling pathways can be triggered or altered by viral infections, thereby contributing to the development of cancers. Several types of virus, including human immunodeficiency virus (HIV), EBV, human T-cell leukemia-lymphoma virus, and human herpesvirus-8 have been shown to contribute to the development of selected subtypes of lymphoma18. Recent studies have also shown that anti-viral treatment can lead to a complete remission of hepatitis C virus (HCV)-associated, low-grade NHL19.

[1241] Hepatitis B virus (HBV), a small DNA virus, is a leading risk factor for hepatocellular carcinoma and is especially prevalent in South and East Asia. Meta-analyses have reported 2-3 folds higher risk of developing NHL in patients infected with HBV20-23, including DLBCL21,24. It also has been reported that DLBCL patients infected with HBV are diagnosed at young age with a more advanced disease and show a significantly worse outcome24. Thus, epidemiological and clinical studies have both suggested an association of HBV infection with DLBCL. However, the etiopathological role of HBV in lymphomagenesis remains largely unknown. Here, we performed a comprehensive genetic study on DLBCLs from patients with HBV infection and identified distinct molecular features of these tumors.

[1242] Results

[1243] Clinical Features in HBsAg+ DLBCL Patients

[1244] China is an endemic area for HBV infection and the HBV surface antigen positive (HBsAg+) rate is about 7% in the general population25. In our DLBCL cohort (Table 1), 20% patients were HBsAg+ (41/204), which is in line with the high prevalence of HBV infection rate among Chinese DLBCL patients24. There was no significant difference in the percentage of GCB/non-GCB and gender between the HBsAg+ and HBsAg− groups (Table 1). However, compared to HBsAg− cases, the HBsAg+ DLBCLs patients presented distinct clinical features: first, they displayed significantly younger age at diagnosis (median age, 41 vs. 61 years, p<0.0001, χ2 test); second, they showed significantly higher international prognostic index (>3, 53.7% vs. 28.8%; p<0.0001, χ2 test), more advanced disease (stage III/IV, 70.7% vs. 45.4%; p=0.0037, χ2 test), an elevated level of lactate dehydrogenase (68.3% vs. 47.9%; p=0.0192, χ2 test) and more frequent involvement of the spleen (31.7% vs 17.2%; p=0.0379) (Table 1); third, HBsAg+ DLBCLs showed significantly reduced overall survival as compared to the HBsAg− DLBCL patients (FIG. 85A). When the two cell-of-origin subtypes (GCB and non-GCB) or the treatment (CHOP and R-CHOP) were considered separately, a reduced, but non-significant overall survival was observed in HBsAg+ patients with the GCB subtype or within the CHOP treated group (FIGS. 85A, 85C).

[1245] Genetic Landscape of HBV-Associated DLBCLs

[1246] Identification of Significantly Mutated Genes in the Discovery Cohort

[1247] In order to understand the genetic heterogeneity and difference between HBsAg+ and HBsAg− DLBCLs, we performed whole exome sequencing (WES) and/or whole genome sequencing (WGS) on DNA prepared from tumor biopsies and matched peripheral blood cells from 65 Chinese DLBCL patients. By including previously sequenced 31 pairs of Chinese DLBCL/control samples8,26 altogether 96 paired tumor/control samples were analyzed as a discovery cohort, including 19 HBsAg+ and 77 HBsAg− tumors (Table 2). A median of 162 (11-460) or 10,835 (635-36,052) somatic mutations per tumor was observed in samples sequenced by WES or WGS, respectively. Among these, a median of 67 (5-160, WES) or 79 (9-159, WGS) non-silent coding region mutations per tumor were observed.

[1248] Three prediction methods were performed to define cancer-driver genes in our DLBCL discovery cohort27-29. Altogether 131 genes were affected by somatically occurring, non-silent mutations in at least 5 samples (5%) and among these, 66 genes were considered to be significantly mutated (q<0.1, and mutated in at least 5% of all samples; FIG. 79). The most frequently mutated genes were PIM1 (28%), BTG2 (19%), MLL2 (17%), HISTIHIE (17%), TP53 (17%), B2M (16%), CD70 (16%), DTX1 (15%), SGK1 (15%), FAS (15%), MYD88 (15%), BCL6 (14%), KLF2 (14%) and ZFP36L1 (12%). Other frequently mutated genes included well-studied tumor suppressor genes: PRDM1 (7%), PRKCB (7%), TNFAIP3 (8%), and oncogenes such as ETS1 (8%), BCL2 (7%), IRF4 (6%) and MYC (6%). Among the 66 potential cancer driver genes, KLF2 (14%), ZFP36L (12%), OSBPL10 (10%), VMP1 (6%) MSL2 (5%), MEOX2 (5%) and TP73 (5%) have not been appreciated previously as being significant mutation targets in DLBCLs. Genes significantly mutated in our cohort were further assigned to the DAVID database for KEGG pathway analysis{Huang da, 2009 #80}. Notably, consistent with the high HBV infection rate in our DLBCL cohort, one of the most significantly mutated pathways is the HBV-infection associated pathway, which has not been described previously. Additional significant pathways identified include BCR-, JAK-STAT- and NF-κB signalling pathways (Table 3).

[1249] Enhanced Mutagenesis in HBV-Associated DLBCLs

[1250] Next, the general mutation profile in the genome of HBsAg+ and HBsAg− DLBCLs was compared. The total mutation load in the whole genome was higher in HBsAg+ DLBCLs, although not reaching statistical significance (median, 16171 vs. 9796; Mann-Whitney U test, p=0.13; FIG. 80A). In the coding genome, HBsAg+ DLBCLs furthermore showed significantly more non-silent mutations than those of HBsAg− DLBCLs (median, 111 vs. 69, Mann-Whitney U test, p=0.047; FIG. 80B).

[1251] The genome-wide mutational signatures of 60 cases with WGS data were subsequently characterized based on the 96 possible mutation types. Seven highly confident mutational signatures were extracted from our cohort (FIG. 80C), and when compared with the signatures published in COSMIC (http://cancer.sanger.ac.uk/cosmic/signatures), six of them (signatures 1-6) have been identified previously30. The signature 7, which is characterized by T to V (V=A, C or G) transitions/transversions at WpTpW (W=A or T) trinucleotides, was novel and not associated with any signatures in COSMIC database (cosine similarity analysis, p<0.6). Furthermore, signatures 2, 6 and 7 were significantly enriched in HBsAg+ tumors (FIG. 80D). The signature 2 was dominated by C>T mutations and signature 6 was characterized by C>A mutations. Of these, mutation signature 2 is potentially induced by APOBEC enzymes, which belong to a family of proteins that usually function in the defense against viral infections, such as HIV and HBV31,32. Taken together, our data suggest that HBV-associated DLBCLs displayed an overall enhanced mutagenesis and are associated with selected mutational signatures, which may be partially resulting from APOBEC enzyme activity.

[1252] Distinct Set of Mutated Genes in HBsAg+ DLBCLs

[1253] Based on the discovery cohort, the most frequently and significantly mutated genes in HBsAg+ DLBCLs (n=19) were TMSB4X, FAS, BCL6, KLF2, UBE2A, SGK1, CD70, BTG2, PIM1, CXCR4, DTX1, EBF1, TNFRSF14, TP53 and ZFP36L1 (Table 4). KEGG pathway analysis showed that the most significant pathway is associated with HBV infection as expected, as well as the FOXO signaling pathway. Notably, some genes were significantly more frequently mutated, or only mutated in the HBsAg+ group (p<0.05, χ2 test), such as UBE2A, TMSB4X, CDK14, BCL6, CXCR4, IKZF3, FAS, KLF2, TP73, EBF1 and SGK1 (Table 5).

[1254] To further validate and define preferentially mutated genes in HBsAg+ DLBCLs, a list of lymphoma relevant genes (n=212) was selected based on results from our discovery cohort and the literature, and a target resequencing panel, referred to as a lymphochip, was constructed (Table 6). The WES/WGS and lymphochip data were subsequently combined and analyzed in altogether 41 HBsAg+ DLBCL and 163 HBsAg− DLBCL samples. In the HBsAg+ DLBCL tumors, our analysis revealed 71 genes that were affected by non-silent mutations in at least 3 tumor samples (7% of cases) and 48 of these genes were affected by non-silent mutations in at least 4 tumor samples (10% of cases), representing the most frequently mutated targets in HBsAg+ DLBCL tumors (Table 7). When comparing the mutation profiles in HBsAg+ and HBsAg− DLBCL tumors, a unique mutation spectrum was observed in the HBsAg+ tumors (FIG. 81 and Table 8). Firstly, 20 genes were confirmed to be preferentially mutated in the HBsAg+ group (p<0.05, 2 test or Fisher's exact test), including KLF2 (32%), CD70 (32%), BCL6 (32%), TMSB4X (29%), TNFRSF14 (29%), FAS (27%), UBE2A (22%), ZFP36L1 (20%), STAT3 (17%), NFκBIE (17%), CXCR4 (15%), IKZF3 (12%), MSL2 (12%), MKI67 (12%), RRAGC (12%), CHEK2 (10%), CDK14 (7%), CDKN1B (7%), ERBB2 (7%) and TRAF3 (7%). Some of these genes are known to be involved in control viral infections, such as CD70, TNFRSF14 FAS, MSL2 and CXCR4. Notably, four genes can be assigned to the FOXO signaling pathway (BCL6, CDKN1B, KLF2 and STAT3), which has been suggested to discriminate tonic from chronic active BCR signaling in DLBCL33 Secondly, well-known somatic mutation targets in DLBCL, such as CD79A and CD79B (BCR signaling), CIITA and B2M (immune evasion), BCL7A, as well as CREBBP, EP300 and EZH2 (chromatin modification) were rarely mutated in the HBsAg+ tumors (FIGS. 81 and 82). There are however some recurrently mutated genes that are equally distributed in HBsAg+ and HBsAg− DLBCLs, such as PIM1, DTX1, TP53, HISTIHIE, BTG1, TBL1XR1 and GNA13 (FIG. 81). Patients with a higher HBV viral load (FIGS. 89B-89C) or occult HBV infection (FIG. 90) might also be associated with certain frequently mutated genes. However, sample size for each specific group is notably limited. Taken together, these data showed a distinctive set of mutated genes in HBsAg+ DLBCLs, affecting multiple key pathways involving lymphomagenesis (FIG. 82), further support that HBV infection may have a significant impact on the development of these tumors.

[1255] Enriched BCL6 Mutations and Translocations in HBV-Associated DLBCLs

[1256] BCL6, a well-known proto-oncogene for the development of B-cell lymphoma, encodes a transcriptional repressor that is required for germinal center reactions. In our cohort, somatic, non-silent mutations of BCL6 preferentially occurred in HBsAg+ DLBCLs (FIG. 81; 32% vs. 9%, p=0.0002, χ2 test). More than half of the identified BCL6 mutations were missense, which potentially affect the transcriptional binding of downstream genes (FIG. 83A) Among the other mutations, 6% were nonsense mutations and 43% were splicing mutations located at a hotspot position (chr3:187463196), which affects the splicing between the non-coding exons 1 and 2 (FIG. 83A). The latter may lead to the constitutive expression of BCL6 by disrupting the regulation loop in which the BCL6 gene itself can be negatively regulated by its gene product34. In addition, in samples characterized by WGS (n=60), the frequency of chromosomal translocation involving BCL6 was also significantly increased in HBsAg+ DLBCLs compared to that in HBsAg− DLBCLs (62% vs. 28%; p=0.023, χ2 test), with the BCL6 breakpoints mainly occurring in a 3 kb region located at exon 1 and intron 1 (FIG. 83A). Furthermore, most of these tumors carrying a non-silent mutation of BCL6 also had a BCL6 translocation (8/13), and taken together, the genetic alternations (non-silent mutations and/or translocations) in BCL6 were significantly enriched in the HBsAg+DLBCLs (85% vs. 28%; p=0.002, χ2 test), suggesting a critical involvement of BCL6 in HBV-associated DLBCLs.

[1257] Enriched KLF2 and ZFP36L1 Mutations in HBV-Associated DLBCLs

[1258] KLF2 encodes a transcription factor which is important for maintaining the follicular B-cell identity (Hart et al. Proc Natl Acad Sci USA 108(2):716-721; 2011). Its absence in mice leads to an expansion of marginal zone B-cells and mutations in this gene have been identified at a high frequency (20-42%) in splenic marginal zone lymphoma (SMZL)36,37. It was found to be either not recurrently mutated3-9,36 or mutated at a relatively lower frequency (11%) in DLBCLs37. In our cohort, KLF2 was affected by non-silent mutations in 14% of all tumors analyzed, and it was the most significantly mutated gene in HBsAg+ DLBCLs (FIG. 81 and FIG. 83B).

[1259] It has recently been shown that KLF2 can be directly regulated by the mRNA decay activator protein ZFP36L1, which is required for the development and maintenance of the marginal-zone B-cell compartment38. However, a significant frequency of mutation in ZFP36L1 has neither been reported in SZML, nor in DLBCL12. In our DLBCL cohort, ZFP36L1 was mutated in 12% of all samples and preferentially mutated in HBsAg+ DLBCLs (FIG. 81 and FIG. 83C; 20% vs. 7%). The KLF2 and ZFP36L1 mutations were mutually exclusive in most cases, leading to that 44% of HBsAg+ DLBCL patients carried at least one non-silent mutation in either gene, which was significantly higher than in HBsAg-DLBCL patients (44% vs. 16%; p=0.0001, χ2 test, FIG. 81), indicating the involvement of these molecules in the development of HBV-associated tumors.

[1260] Genetic Alterations in the TP53 Signaling Pathway

[1261] Approximately 37% of the HBsAg+ DLBCLs carried nonsilent, almost mutually exclusive, mutations in the TP53, TP63 or TP73 genes (FIGS. 86A-86C, 91A-91C). The DNA binding domain (DBD) of p53, p⁶³ and β73 show approximately 63% identity in amino-acid sequence and are structurally highly conserved. Eight TP63 and seven TP73 mutations were located in the DBD domain of the respective proteins, and the majority of these alterations are corresponding to or close to the TP53 mutation hot-spots (FIG. 91D). Furthermore, mutations in TP63 and TP73, but not in TP53, were enriched in the HBsAg+ DLBCLs (18% vs. 6%; p=0.0066, χ2 test). In addition, we also noticed that one sample had skipped the expression of exon 4, resulting in disruption of the DNA binding domain (DBD) of p73 (FIG. 87.) The DBD of p63, p73 and β53 show approximately 63% identity in amino-acid sequence and are structurally highly conserved. Five out of 10 mutations in TP63 and four mutations in TP73 were located in the DBD, which correspond to or close to the hot-spot mutation regions in TP53 (FIG. 86D), suggesting a potential effect on DNA binding. Furthermore, mutations in TP63 and TP73, but not in TP53, were enriched in the HBsAg+ DLBCLs (20% vs. 6%; p=0.026, χ2 test). In addition to TP63 and TP73, several genes related to p53 upstream or downstream signaling, BTG2, CHEK2 and FAS, are also preferentially mutated in HBsAg+ samples (FIGS. 81 and 82).

[1262] By using a p53-responsive EGFP reporter assay (Bykov et al. Nat Med 8(3):282-288; 2002), we further investigated whether TP73 mutations can affect the DNA binding activity of p73. Cotransfection of a p53 binding site containing EGFP reporter and a WT TAp73 expressing construct into a p53-deficient cell line showed that WT TAp73 could bind to p53-responsive sites and transactivate GFP expression, although less efficient as compared to WT p53 (FIG. 91E). Two mutations (K192E and R300C) in the DBD domain displayed a significantly impaired ability to transactivate GFP expression. Two truncating mutants (G449fs and S492fs) showed a significantly increased ability of transactivation in the current assay (FIG. 91E). However, the loss of the SAM domain and the C-terminal in these mutants may abolish the physical interaction between p73 and other proteins such as PTEN, resulting in an inability to induce apoptosis in response to DNA damage (Lehman et al. J Biol Chem 286(42):36631-36640; 2011). The other four mutations (M266I and P270L in the DBD domain, Δ530D and P534T in the SAM domain) did not affect the transcriptional activity of TAp73. Taken together, a subset of the identified TP73 mutations may thus impact the DNA binding activity of p73.

[1263] Gene Expression Analysis and Gene Set Enrichment Analysis (GSEA) in HBsAg+ and HBsAg− DLBCLs

[1264] To further explore the specific molecular signatures in HBV-associated tumors, we characterized the transcriptome of 106 DLBCLs that have undergone WES and WGS analysis, including 21 HBsAg+ and 85 HBsAg− samples. A distinctive mRNA expression profile was observed in HBsAg+ DLBCLs compared to HBsAg− samples, including a group of upregulated genes, such as MDM2, PIK3CD, SGK1, BCL2L1, TP63 and several MHC class II molecule-related genes (CIITA, HLA-DPB1, HLA-DRA, HLA-DRB4 and HLA-DRB5) and a group of downregulated genes such as CD320 and CD24 (FIGS. 84A-84C and Table 9). GSEA was subsequently performed39 and the expression of genes that belong to several gene sets were found to be significantly upregulated in HBsAg+ DLBCLs as compared to HBsAg− DLBCLs, including the antigen processing and presentation and β53 signaling pathways (FIG. 84B and Table 10). The GSEAPreranked tool was further applied and the BCL6-targeted40,41 as well as ZFP36L1-bound38 genes were significantly enriched in genes differentially expressed between HBsAg+ and HBsAg− DLBCLs (FIG. 84C), which is consistent with the observation that these transcription factors were preferentially mutated in HBsAg+ DLBCLs.

[1265] Characterization of V(D)J Region of Immunoglobulin Heavy Chain (IGH) in HBsAg+ and HBsAg− DLBCLs

[1266] By sequencing the V(D)J regions of IGH from 52 DLBCL samples using either PCR-cloning and/or high throughput sequencing methods, we have identified the major clone from 27 DLBCL samples, including 15 HBsAg+ samples (Table 15). The most frequently used heavy chain variable (VH) region genes were VH4-34 (20%) and VH3-23 (20%) in HBsAg+ DLBCLs and VH4-34 in HBsAg− DLBCLs (30%). All VH region genes were mutated (6-86 mutations; 3% to 31%) and there was no significant difference in mutation frequency between the two groups. The amino acid sequences deduced from CDR3 sequences are shown in Table 15 and no sequences were qualified as stereotyped according to the criteria described previously (Murray et al. Blood 111(3):1524-1533; 2008). Furthermore, we did not find any significant sequence homology of CDR3 region in HBsAg+ samples to anti-HBsAg or HBsAg binding protein using the BLAST program.

### DISCUSSION

[1267] The genetics of DLBCL has been studied by various NGS approaches and the somatic mutation landscape of these tumors is emerging3-9, 11. This has facilitated the identification of key cancer drivers for the two main subtypes of DLBCL. However, most of DLBCL patients previously studied belonged to Western populations and by analyzing a small cohort of patients, we have shown a different somatic mutation spectrum in Chinese DLBCLs8,13 Here, by integrating WGS, WES, targeted resequencing and RNAseq, we performed a comprehensive genetic characterization of 204 Chinese DLBCL samples and confirmed that there are 39 genes that show a significantly different frequency of mutations in Chinese DLBCL samples as compared to those from the Western populations (mutated in at least 5% Chinese patients, and β<0.05, Table 11). Furthermore, 20% of our patients were HBsAg+, which provided an opportunity to explore the genetic alternations in HBV-associated DLBCLs. We observed an overall enhanced mutagenesis in the HBsAg+ DLBCL genomes and identified a unique set of genetic alterations and a distinct gene expression profile in these tumors.

[1268] Together with the epidemiology and clinical evidence, our genomic data strongly suggest a causative role of HBV infection in the development of DLBCL. A previous study has suggested a chronic antigenic stimulation as a most likely mechanism for the oncogenic role of HBV for lymphoma24. This is supported by a history of chronic HBV infection, a frequent involvement of spleen and retroperitoneal lymph nodes and a biased usages of certain variable regions of immunoglobulin heavy and kappa light chain genes (IGHV4-3 and IGKV4-1) in HBV-associated DLBCLs24, reminiscent the situations in HCV-associated NHL where most of lymphoma cells expressed the IGVH1-69 and VK3-Δ27 genes that encode the antibodies specific for HCV-E2 antigens42-43. In our DLBCL patient cohort, the clinical presentation is very similar to that described previously24 and we also observed that HBsAg+ patients had more frequent involvement of the spleen. However, by sequencing the IGVH of 8 HBsAg+ DLBCL tumors, we did not find any clear evidence of a biased usage of IGVH genes or stereotyped CDR3 regions (data not shown).

[1269] An alternative, but not mutually exclusive mechanism could be that HBV virus directly infects B-cells, which results in genetic alterations that lead to the development of malignancies. HBV is by definition a hepatotropic virus, but it can also infect lymphocytes and the lymphoid system that has been shown as an important reservoir for HBV44,43,45. By RT-PCR and immunohistochemistry (IHC) analyses, expression of viral DNA (polymerase) and antigen (HBx) were indeed detected in a subset of our HBsAg+ DLBCL tumors (Table 21 and FIG. 88). As HBV DNA has been previously found to be integrated into chromosomal DNA of lymph node cells46 one possible mechanism could be that like in HBV-induced hepatocellular carcinomas47, HBV DNA integration into the B-cell genome may directly activate oncogenes or deactivate tumor suppressors or lead to instability of the host genome. However, we were not able to detect HBV gene integration based on our WGS data, probably due to that the depth of sequencing was still not optimal for detection of viral sequences. Another possibility is that HBV-induced, APOBEC-mediated mutagenesis has contributed to the overall increased mutation burden in HBsAg+ DLBCLs. Some of the APOBEC family proteins, including APOBEC3C, APOBEC3G and APOBEC3H, have the ability to induce hypermutations in the HBV genome48, suggesting a strong connection between HBV infection and the activity of these enzymes. The enrichment of an APOBEC-associated mutation signature in our HBsAg+ DLBCL genomes further indicated an enhanced enzyme activity of these molecules in these tumors. Exome sequencing has identified several genes were frequently mutated in HBV-associated hepatocellular carcinoma, including TP53 and ARID1A49. In our cohort, ARID1A was mutated in altogether 9% of DLBCL with a slightly higher frequency in HBsAg+ DLBCLs (12% vs. 8%). The majority of genes that were preferentially mutated in HBV-associated DLBCLs do not overlap with those in HBV-positive hepatocellular carcinomas (Table 16). By reanalyzing our previously published data from Chinese lung adenocarcinoma patients50, we have identified a set of genes that are mutated at a different mutation frequency between HBsAg+ and HBsAg− individuals (Table 13) but again, not overlapping with the genes preferentially mutated in HBV-associated DLBCLs. Thus, alterations in HBV-associated DLBCL were most likely generated/selected in a B-cell-specific manner. Indeed, we noticed that 6 of 20 of the genes preferentially mutated in HBV-associated DLBCLs are potentially off-targets of activation-induced cytidine deaminase (AID), including KLF2, BCL6, TMSB4X, TNFRSF14, FAS, CXCR4 and ZFP36L1. This may reflect a “hyper-active” status of B-cells due to chronic infection and an enhancement of mutational activity mediated by AID. Finally, expression of HBV viral protein, in particular HBx, may be directly involved in regulation of the p53 and NF-κB signaling pathways51Taken together, genetic lesions resulting from chronic HBV infection of B-cells may be a plausible mechanism underlying the oncogenic role of the virus in lymphomagenesis.

[1270] The HBV-associated genetic changes in DLBCLs mainly affect several pathways, including p53 signaling, FOXO signaling, chromatin modification and immune evasion (FIG. 4) Further dissecting the altered genes/pathways may provide new insights of the pathogenic mechanisms as well as novel therapeutic strategies for HBsAg+ DLBCLs. It is notable that this is the first report showing that TP63 and TP73 are frequently mutated in any type of cancer, strongly suggesting a unique role of these two tumor suppressors in lymphomagenesis, especially in individuals infected with HBV. Therapies targeting/modulating TP63 or TP73, instead of, or in addition to TP53, might therefore be of interest to consider. The FOXO signaling, which is triggered by the PI3K/AKT activity, regulates cell cycle, apoptosis and the dark zone program of germinal centers52 through targeting a large number of downstream genes, including several genes that are preferentially mutated in HBsAg+ DLBCL samples (CDKN1B, BCL6 and KLF2). Furthermore, this signaling is a hallmark for tonic BCR signaling in DLBCL33. It is possible that the genetic changes in this pathway promote the growth and survival of tumor cells in HBsAg+ DLBCLs through a tonic BCR dependent manner, which opens the possibility that targeted therapy on tonic BCR signaling may be beneficial for DLBCL patients infected with HBV. In addition, considering the exceptionally high frequency (85%) of BCL6 genetic alternations in HBsAg+ tumors, in combination with chemotherapy, the inhibition of BCL6 may help to suppress the growth of the tumor cells in these patients53. A group of chromatin modifying genes such as CREBBP and EP300 were rarely mutated in HBsAg+ tumors. It is possible that these molecules play a role in the regulation of HBV replication54, rather than being a cancer-driver in these tumors. Alternatively, HBx could directly interact with CBP/p300 and facilitate the recruitment of the complex onto CREB-responsive promoters, leading to the activation of expression of downstream genes51. The latter was supported by the observation that the CREBBP-targeted genes55 were significantly upregulated in HBsAg+ tumors compared to that in HBsAg− tumors (FIG. 88). Inhibition of the CBP/p300 bromodomain by BET bromodomain inhibitors such as JQ1 and/or I-CBP112 may theoretically help to block the survival or growth of the tumor cells from HBV-associated DLBCL patients56. Finally, among the genes related to immune regulation/evasion, CD70 and TNFRSF14 were frequently mutated in HBsAg+ DLBCLs, whereas B2M and CIITA, both related to CREBBP function and MHC class II molecule expression, were less mutated (FIGS. 81 and 82). We noticed that more than half of the mutations observed in CD70 and TNFRSF14 were truncated (splicing, deletion and stop gain), indicating a deleterious effect. Furthermore, loss of CD70 and TNFRSF14 copy numbers was also detected in 64% and 21% of WGS sequenced DLBCL tumors (data not shown), respectively. These data suggest a tumor suppressor role of CD70 and TNFRSF14, which could be interpreted as a mechanism of immune surveillance and that mutations in these genes in malignant B-cells impair T- or NK-cell-mediated antitumor responses, particularly in a microenvironment affected by HBV infection. Therapies that modulate the CD27-CD70 or TNFRSF14-CD272 pathways could thus be an interesting alternative for immunotherapy in HBsAg+ patients57 58.

[1271] Some of the differences we observed between the Chinese and Western populations can now be explained by the HBV infectious status. For instance, mutations in BCL6, CD70, FAS, KLF2, TMSB4X, MSL2 and NFκBIE that were preferentially observed in HBsAg+ DLBCLs were also significantly enriched in Chinese DLBCLs compared to the Western cohorts, and a similar trend was observed for SOCS1, ZFP36L1, CXCR4 and EBF1 (Table 11). Furthermore, genes that were rarely mutated in Chinse DLBCLs, such as CREBBP and EZH2, were also less often mutated in the HBsAg+ samples (FIG. 81 and Table 11). However, some significant alterations in the Chinese samples cannot be attributed to the status of HBV infections. For example, mutations in B2M, a gene encoding the beta-2-microglobulin and which is critical for the expression of MHC class I molecules, were observed at a higher frequency in Chinese DLBCLs (14% vs. 7% in Western cohorts), but at a lower rate in HBsAg+ samples (5% vs. 16% in HBsAg− cases). Similarly, mutations in BCL7A were significantly enriched in Chinese DLBCLs, but were absent in the HBsAg+ samples (0 vs. 8% in HBsAg− cases). In addition, several genes that were significantly mutated in Chinese DLBCLs, such as HISTIHIE, DTX1, DDX3X, PRDM1, MCL1, MLL3, MPEG1, NOTCH2, PIM1 and VMP1, were mutated at a similar frequency between HBsAg+ and HBsAg− samples (Table 11). DTX1 and NOTCH2 are involved in the NOTCH signaling pathway{Rosenquist, 2017 #53}, whereas MCL1, an anti-apoptotic member of BCL2 family, plays an important role for the survival of both normal and malignant lymphocytes{Fernandez-Marrero, 2016 #101}. Conversely, mutations in BCL2 gene itself is significantly less in Chinese DLBCLs compared that in Western DLBCL samples (Table 11). VMP1 encodes a transmembrane protein that plays a regulatory role in the process of autophagy and apoptosis in cancer cells{Qian, 2014 #102}. Notably, recurrent mutations in DDX3X have also been identified in Chinese extranodal NK/T-cell lymphoma, which is highly associated with EBV infection and host genetic background13, 60. Moreover, MKI67, CDK14, IKZF3 and STAT3 were preferred mutation targets in HBsAg+ DLBCLs, but mutations in these genes were not enriched in our Chinese cohort (Table 11). Taken together, the high incidence of concomitant HBV infection in Chinese DLBCL patients may contribute to the distinct mutation spectrum observed in the corresponding lymphoma samples. However, other genetic or environmental factors, such as EBV infection, may also have an impact.

[1272] In conclusion, using a comprehensive analysis of genetic alternations in HBV-infected DLBCLs, we present the first genetic evidences that link HBV infection to B-cell lymphomagenesis. Based on the distinct clinical and molecular features, HBsAg+ DLBCL should be classified as a separate subtype of DLBCL. The targetable genetic alterations identified in this study may also provide opportunities for development of novel or more precise therapeutic strategies for DLBCL patients with concomitant HBV infection.

[1273] Material and Methods

[1274] Patient Information

[1275] Frozen tumor biopsies and matching peripheral blood DNA from 96 Chinese DLBCL patients were obtained from the Sun Yat-Sen University Cancer Center and Tianjin Medical University Cancer Institute and Hospital (Table 2). For the cohort expansion study, additional 108 DNAs were also extracted from frozen biopsies from the same hospitals. All tumor specimens were reviewed and scored by independent pathologists to determine the tumor type and subtype at the Sun Yat-Sen University Cancer Center or Tianjin Medical University Cancer Institute and Hospital. Detection of HBsAg, anti-HBV surface-antigen antibody (HBsAb), HBV e-antigen (HBeAg), anti-HBV e-antigen antibody (HBeAb) and anti-HBV core antibody (HBcAb) was performed as routine blood tests in all patients. HBV DNA copy number was also measured in 22 HBsAg+ patients. The study was approved by the Institutional Review Boards at the Sun Yat-Sen University Cancer Center, the Tianjin Medical University Cancer Institute and Hospital and the Karolinska Institutet.

[1276] PCR for HBV Detection and IHC Staining for Expression of HBV x-Antigen

[1277] A TaqMan probe assay was used to detect the sequences encoding HBV polymerase. The primer and probe sequences have been described previously61. To detect HBxAg in situ, we performed IHC staining for the HBx antigen on formalin-fixed paraffin-embedded tissues. The anti-HBx antibody (ab235, Abcam, Cambridge, Mass., USA) was diluted into 1:100 with antigen retrieval buffer (sodium citrate, pH 6.0). The staining intensity was scored on a scale of 0-3 as negative (0), weak (1), medium (2) or strong (3). The extent of the staining, defined as the percentage of positive staining areas of tumor cells in relation to the whole tumor area, was scored on a scale of 0 (0%), 1 (1-25%), 2 (26-50%), 3 (51-75%) and 4 (76-100%). An overall protein expression score (overall score range, 0-12) was calculated by multiplying the intensity and positivity scores. Fibroblast and endothelia cells on the same slides were used as internal negative controls.

[1278] Whole Genome/Exome Sequencing (WGS/WES) Analysis

[1279] DNA was extracted with the DNeasy Tissue and Blood Kit (Qiagen, Venlo, Netherlands). WGS/WES were performed in the Beijing Genome Institute (BGI, Shenzhen, China) using either HiSeq 2000 or HiSeq X10 platforms (Illumina, San Diego, Calif.) or Complete Genomics (BGI). 60 pairs of DLBCL/control samples were sequenced by WGS, and 47 pairs of samples were sequenced by WES. Among these, 11 pairs of samples have been sequenced by both WGS and WES. Analysis of significance of mutated genes was performed by three prediction methods26-28, and the resulting top gene lists (q value<0.1) were merged to identify significantly mutated genes in the discovery cohort. The mutational signature analysis was performed based on WGS data using a Bayesian version of the non-matrix factorization method29.

[1280] DNA Extraction, WGS and WES

[1281] DNA was extracted with the DNeasy Tissue and Blood Kit (Qiagen, Venlo, the Netherlands) according to the manufacturer's instructions. WGS and WES were performed in the Beijing Genome Institute (BGI, Shenzhen, China) using either the Illumina HiSeq 2000 or Hiseq X10 platforms (Illumina, San Diego, Calif.) or Complete Genomics (BGI). In total, 96 pairs of DLBCL tumor and matched control (peripheral blood) DNA samples were sequenced (Table 1). Of these, 60 pairs of tumor/control samples were sequenced by WGS (47 pairs of samples were sequenced by the Illumina platforms and the remaining samples were analyzed using the Complete Genomics platform, and 47 pairs of tumor/control samples were sequenced by WES (Illumina). Among these, 11 pairs of samples have been sequenced by both WGS and WES (Table 1). Sequence reads were aligned to the genome with the Burrows-Wheeler Aligner software62 and single-nucleotide variants (SNVs) were detected using Varscan63 whereas somatic insertions and deletions (InDels) were identified by GATK (WES)64 or Platypus (WGS)65. On average, 94% of the exonic regions were covered by WES and 98% of whole genomes were covered by WGS with at least 10 sequencing reads (Table 12). Somatic mutations were considered when: 1) at least 10 reads in coverage; 2) at least 10% of mutation allele frequency in tumors; 3) less than 1% of minor allele frequency in the paired controls. All reported SNV and InDels passed visual inspection using Integrative Genomics Viewer (IGV)66.

[1282] Identification of Significantly Mutated Genes

[1283] The algorithm from Kan et al. considers the mutation prevalence in the context of the background mutation rate and gene sequence length, as well as evaluation of functional impact{Kan, 2010 #24}, the MutSig algorithm considers the sample-specific mutation rate, the ratio of nonsynonymous to synonymous mutations in a given gene and the median expression level of each gene in the tumors{Lawrence, 2013 #31}, and the OncodriveFML approach provides top-ranking genes based on the functional impact of the mutations{Mularoni, 2016 #82}. The Mutsig algorithm has a limitation in defining the cancer-driver genes in the region of kataegis or clustered mutations, and these features have been observed in the genome of DLBCL{Khodabakhshi, 2012 #26; de Miranda, 2014 #10; Qian, 2014 #48}. Considering the discrepancies between different algorithms, analysis of significance of mutated genes was performed on these three prediction methods and the resulting top gene lists (with q value<0.1) were merged to identify the significantly mutated genes in the discovery cohort.

[1284] Identification of Somatic Mutations

[1285] Sequence reads from WGS/WES were aligned to the human reference genome with the Burrows-Wheeler Aligner software (Li et al. Bioinformatics 25(14):1754-1760; 2009) and single-nucleotide variants (SNVs) were detected using Varscan (Koboldt et al. Bioinformatics 25(17):2283-2285; 2009), whereas somatic insertions and deletions (InDels) were identified by GATK (WES) (Li et al. Genome Res 19(6):1124-1132; 2009) or Platypus (WGS) (Rimmer et al. Nat Genet 46(8):912-918; 2014). On average, 94% of the exonic regions were covered by WES and 98% of whole genomes were covered by WGS with at least 10 sequencing reads (Table 17). Somatic mutations were considered when: 1). at least 10 reads in coverage; 2). at least 10% of mutation allele frequency in tumors; 3). less than 1% of minor allele frequency in the paired controls. All reported SNV and InDels passed visual inspection using Integrative Genomics Viewer (IGV) (Robinson et al. Nat Biotechnol 29(1):24-26; 2011).

[1286] Mutational Signature Analysis

[1287] Mutational signature analysis was performed using a Bayesian version of the non-matrix factorization method{Alexandrov, 2013 #1}. Mutational signatures were extracted from the WGS data of 60 DLBCL tumors as follows: (1) Somatic base substitutions of each data set were classified into 96 possible mutated trinucleotides, 6 types of substitution (C:G>A:T, C:G>G:C, C:G>T:A, T:A>A:T, T:A>C:G and T:A>G:C)×4 types of 5′ base (A, C, G, T)×4 types of 3′ base (A, C, G, T), to generate a mutational catalogue. The prevalence of each type of substitution was subsequently calculated for each sample. (2) Signatures of 10 mutational processes from the mutational catalogue were deciphered using the mutational signature framework. The number of signature extracted (N) is determined by estimating the signature reproducibility and reconstruction error rate as described previously{Alexandrov, 2013 #1}. N here is the number where the lowest reconstruction error is achieved without decreasing the reproducibility. (3) The minimal set of mutational signatures was then determined to optimally explain the proportion of each mutation type found in the catalogue, based on reproducibility of their signatures and low error for reconstruction. Identified mutation signatures were compared with the current published set of signatures from various types of cancers at the COSMIC website: http://cancer.sanger.ac.uk/cosmic/signatures. The cosine similarity was used as a measure of correlation{Alexandrov, 2013 #1}.

[1288] Identification of Mutations by the Targeted-Sequencing Panel Lymphochip

[1289] The final list of variants was generated using the following filtering criteria. After sequencing, sequencing reads were discarded if they contained: (1) adaptor reads; (2) low-quality reads, with >10% Ns); (3) low-quality base (>50% bases with quality<10). High quality paired-end reads were then mapped to the UCSC human reference genome (hg19) using BWA-MEM (v0.7.12) with default parameters (Li et al. Bioinformatics 25(14):1754-1760; 2009). Picard (v1.87; http://broadinstitute.github.io/picard/) was used to sort and mark duplicate reads caused by PCR. More than 99.87% of exonic regions of 212 targeted genes were covered with at least 100× in the lymphochip analysis (Table 17). VarScan (v2.3.9) was used to detect substitutions and Indels using the defined parameters (Koboldt et al. Bioinformatics 25(17):2283-2285; 2009). All substitutions and Indels were then annotated using ANNOVAR. To identify somatically occurring, nonsilent mutations in the tumors and to remove potential contamination from the germline polymorphisms and sequencing errors, the identified SNPs and Indels were filtered using the following steps: 1). SNPs annotated as synonymous were removed; 2). SNPs or Indels with a mutation allele frequency (MAF)>1% in databases of 1000 genome all, 1000 genome East Asian, or Esp6500, or with a MAF>0.01% in databases of ExAC all or ExAC East Asian were removed. 3). SNPs or Indels defined as benign in ClinVar database were filtered out; 4). SNPs or Indels detected in tumor samples, which were also detected in YH cell line tested in parallel, or detected in our in-house Chinese DLBCL health control database with MAF>1% were filtered out; 5). SNPs or Indels detected in more than 50% samples in our cohort with MAF>10% was discarded; 6). All remaining SNPs and Indels with MAF between 10%-90% were kept for further analysis. The performance of the lymphochip was evaluated by including 19 DLBCL samples that had already been characterized by WES or WGS. When considering the nonsilent mutations in the targeted coding region, 93.10% (162/174) of nonsilent mutations identified by WES/WGS can be readily called by the lymphochip using the above filtering strategy and the remaining 12 mutations could also be validated based on manual inspection by IGV, but were filtered out as the MAF was just below the 10% cutoff.

[1290] Functional Characterization of TP73 Mutants

[1291] The full length of the TAp73 sequence (tumor suppressor isoform of p73, a structural homology of p53) was cloned into a pcDNA 3.1 vector (Thermo Scientific, San Diego, USA). TAp73 mutants were generated by site-directed mutagenesis. TAp73 vectors and a reporter construct containing a p53 binding site in front of a GFP reporter (p53-responsive EGFP reporter) were cotransfected into H1299 cells (lacking p53 expression) with Lipofectamine 2000 (Thermo Scientific) in a 6-well plate. After 24-48h, cells were harvested and GFP level was measured by flow cytometry (Accuri™ C6, BD Biosciences).

[1292] Targeted Capture Sequencing by Lymphochip

[1293] A targeted sequencing panel was designed and referred to as a lymphochip. Genes included in the lymphochip were selected with the following criteria: (1) mutated in 3 or more cases within our discovery cohort; (2) recurrently mutated in 3 or more cases in other B cell lymphoma cohorts, including published studies on follicular lymphoma, mantle cell lymphoma, marginal zone lymphoma and Burkitt lymphoma; (3) key DNA repair genes; (4) genes important for targeted therapy. Together, this consists of the entire coding regions of 212 genes (Table 6), for a total size of 572 kb and the lymphochip was synthesized at BGI.

[1294] One hundred ng DNA of each sample was used for preparation of libraries. 2×50 bp pair-end sequencing was performed on BGISEQ500 platform following the manufacturer's instructions{Huang, 2017 #84}. Sequencing reads were discarded if they contained: (1) adaptor reads; (2) low-quality reads, with >10% Ns); (3) low-quality base (>50% bases with quality<10). High quality paired-end reads were then mapped to the UCSC human reference genome (hg19) using BWA-MEM (v0.7.12) with default parameters {Li, 2009 #72}. Picard (v1.87; http://broadinstitute.github.io/picard/) was used to sort and mark duplicate reads caused by PCR. More than 99.87% of exonic regions of 212 targeted genes were covered with at least 100× in the lymphochip analysis. VarScan (v2.3.9) was used to detect substitutions and Indels using the defined parameters {Koboldt, 2009 #73}. All substitutions and Indels were then annotated using ANNOVAR. To identify somatically occurring, non-silent mutations in the tumors and to remove potential contamination from the germline polymorphisms and sequencing errors, the identified SNPs and Indels were filtered using the following steps: 1) SNPs annotated as synonymous were removed; 2) SNPs or Indels with a mutation allele frequency (MAF)>1% in databases of 1000 genome all, 1000 genome East Asian, ExAC all, ExAC East Asian or Esp6500 were removed; 3) SNPs or Indels defined as benign in ClinVar database were filtered out; 4) SNPs or Indels detected in tumor samples, which were also detected in YH cell line tested in parallel were filtered out; 5) SNPs or Indels detected in more than 50% samples in our cohort with MAF>10% was discarded; 6) all remaining SNPs and Indels with MAF between 10%-90% were kept for further analysis. The performance of the lymphochip was evaluated by including five DLBCL samples that had already been characterized by WES or WGS. When considering the non-silent mutations in the targeted coding region, 93% (107/115) of non-silent mutations identified by WES/WGS can be readily called by the lymphochip using the above filtering strategy and the remaining 8 mutations could also be validated based on manual inspection by IGV, but were filtered out as the MAF was just below the 10% cutoff. Altogether 113 DLBCL samples, including five samples that had been tested by WES and/or WGS, were analyzed by lymphochip.

[1295] Sanger Sequencing

[1296] Validation of the KLF2, TP73 and ZFP36L1 mutations identified by WGS/WES was performed by Sanger sequencing. In addition, the non-coding exon 1 of BCL6, which was not included in the design of the lymphochip, was screened in 108 samples. Furthermore, exon 1 of FOXO1, which was covered poorly by WES/WGS, was sequenced in 96 samples. Primers were designed with Primer3 and primer sequences and PCR conditions for each gene are available upon request. PCR products were purified and sequenced at Macrogen (Amsterdam, Netherlands) or Eurofins MWG Operon (Ebersberg, Germany).

[1297] Identification of Potential AID Off-Targets

[1298] Potential AID off-targets are proposed if one of the following criteria is fulfilled: 1). have been reported as an AID targeted gene in mouse studies (Qian et al. Cell 159(7):1524-1537 (2014); Liu et al. Nature 451(7180):841-845 (2008); Chiarle et al. Cell 147(1):107-119 (2011); Hakim et al. Nature 484(7392):69-74 (2012); Meng et al. Cell 159(7):1538-1548 (2014)); 2). have been reported as target of aberrant SHM in human studies (Khodabakhshi et al. Oncotarget 3(11):1308-1319 (2012); Qian et al. Cell 159(7):1524-1537 (2014)); 3). showed a significant SHM indicator (p<0.1) or a significantly higher mutation density within a 2 kb region downstream of transcription start site (p<0.00001) (Khodabakhshi et al. Oncotarget 3(11):1308-1319 (2012)); 4). identified as AID targets in mouse B-cells by target sequencing (Alvarez-Prado et al. J Exp Med 2018—in press).

[1299] RNA Extraction, Transcriptome Resequencing and GSEA

[1300] Transcriptome sequencing was performed in 106 DLBCL tumor samples. Total RNA was extracted using Trizol (Invitrogen, Paisley, UK). After extraction of total RNA, cDNA libraries were prepared at BGI following the manufacturer's instructions and sequenced on the HiSeq 2000 platform{Wu, 2015 #66}. Reads were aligned to the reference human genome and transcriptome hg19 (downloaded from the UCSC website) by SOAP2{Jia, 2013 #22} and the reference sequences used were downloaded from the UCSC website (hg19). The number of reads per kilobase of transcript per megabase of mapped reads (RPKM) was used to determine relative gene expression levels. Genes with a median of RPKM value below 1 were considered as not being expressed and excluded from the analysis. Log 2-transformed RPKM values were normalized by the R package Limma, in order to remove batch effect {Ritchie, 2015 #88}. The normalized expression levels were analyzed by Qlucore Omics Explorer (version 3; Qlucore AB, Lund, Sweden) and GSEA (version 3.0, Broad Institute, Inc.){Subramanian, 2005 #57}. GSEA was performed with 1000 phenotype permutations.

[1301] Characterization of V(D)J Rearrangements in DLBCL Tumors

[1302] Rearranged IGHV-IGHD-IGHJ genes were amplified, cloned and sequenced from the tumor DNA samples as described previously{Wu, 2010 #110}. IGH gene usage, somatic mutations in the IGHV genes and composition of the CDR3 regions were analyzed by the IMGT/V-QUEST tools{Brochet, 2008 #111}

[1303] For the cloning by using DNA as template, primers for framework region 1 or 2 (FR1/FR2) were used and V(D)J rearrangements were amplified from 11 samples, including 6 HBsAg+ and 5 HBsAg− DLBCL cases. For the cloning by using cDNA as template, V(D)J rearrangements were amplified from 9 samples, including 8 HBsAg+ and 1 HBsAg− DLBCL cases. IGH gene usage, somatic mutations in the IGHV genes and composition of the CDR3 regions were analyzed by the IMGT/V-QUEST tools (Brochet et al. Nucleic Acids Res 36:W503-508; 2008). Major clone was identified as: 1). more than 9 clones were sequenced; 1). at least 5 clones were identical. Major clones were identified from 9 samples, including 4 HBsAg+ and 5 HBsAg− samples. Two of samples were also tested by the high throughput methods (Table 15).

[1304] For the high throughput sequencing of V(D)J rearrangements, primers for FR1 were used (van Dongen et al. Leukemia 17(12)2257-2317; 2003) and VDJ rearrangements were successfully amplified from 36 samples, including 19 HBsAg+ and 17 HBsAg− DLBCL cases. Major clones were identified from 18 samples, including 11 HBsAg+ and 7 HBsAg-samples (Table 15). Initial PCR was performed according to the BIOMED-2 Concerted Action protocols (van Dongen et al. Leukemia 17(12)2257-2317; 2003). The PCR product was purified using Agencourt AMPure XP PCR clean up (Beckman Coulter) with size selection in the range of 200-500 bp. Indexing PCR was performed on 20 L purified PCR product using primers from illumina TruSeq DNA HT dual-index kit according to the manufacturer's protocol. After clean up, DNA concentrations were measured in each sample using Qubit dsDNA high sensitivity kit (Thermo Fisher Scientific) and then samples were pooled equimolar to the final concentration of 4 nM. Sequencing was performed using MiSeq paired-end 600 cycles reagent kit v3 (Illumina). Sequencing data was analysed using MIXCR software (Bolotin et al. Nat Methods 12(5):380-381; 2015).

[1305] Statistics

[1306] P values were calculated using appropriate statistical tests: X-test, Fisher's exact test or Mann-Whitney U test (two-tailed). Statistical tests were performed with GraphPad Prism.

TABLE 1
Clinical characteristics in
HBsAg⁺ and HBsAg⁻ DLBCL patients.

| | HBsAg⁺ | HBsAg⁻ | |
|---|---|---|---|
| | DLBCL (%) | DLBCL (%) | p value^{a} |
| No. of patients | 41 | 163 | |
| Age (years) | | | |
| >60 | 6 (14.6%) | 83 (50.9%) | <0.0001 |
| ≤60 | 35 (85.4%) | 80 (49.1%) | |
| Gender | | | |
| Female | 12 (29.3%) | 66 (40.5%) | 0.1862 |
| Male | 29 (70.7%) | 97 (50.9%) | |
| Performance status | | | |
| 0-1 | 27 (65.9%) | 130 (79.8%) | 0.0588 |
| 2-4 | 14 (34.1%) | 33 (20.2%) | |
| Elevated LDH | | | |
| Yes | 28 (68.3%) | 78 (47.9%) | 0.0192 |
| No | 13 (31.7%) | 85 (52.1%) | |
| Subtype | | | |
| GCB | 17 (41.5%) | 64 (39.3%) | 0.7969 |
| Non-GCB | 24 (58.5%) | 99 (60.7%) | |
| Stage | | | |
| I-II | 12 (29.3%) | 89 (54.6%) | 0.0037 |
| III-IV | 29 (70.7%) | 74 (45.4%) | |
| IPI | | | |
| 0-2 | 19 (46.3%) | 116 (71.2%) | <0.0001 |
| 3-5 | 22 (53.7%) | 55 (28.8%) | |
| Spleen involvement | | | |
| Yes | 13 (31.7%) | 28 (17.2%) | 0.0379 |
| No | 28 (68.3%) | 135 (82.8%) | |
| Liver involvement | | | |
| Yes | 6 (14.6%) | 12 (7.4%) | 0.1422 |
| No | 35 (85.4%) | 151 (92.6%) | |

TABLE 2
Sample information for the discovery cohort

| Sample | | |
|---|---|---|
| ID | Sequencing platform | Data |
| DL104 | Complete Genomics WGS | This report |
| DL106 | Complete Genomics WGS | This report |
| DL108 | Complete Genomics WGS | This report |
| DL147 | Illumina WGS | This report |
| DL150 | Illumina WGS | This report |
| DL152 | Illumina WGS | This report |
| DL154 | Illumina WGS | This report |
| DL172 | Illumina WGS | This report |
| DL522 | Illumina WES | This report |
| DL103 | Complete Genomics WGS | This report |
| DL161 | Illumina WGS | This report |
| DL162 | Illumina WGS | This report |
| DL530 | Illumina WES | This report |
| DL22 | Complete Genomics WGS | This report |
| DL100 | Complete Genomics WGS | This report |
| DL101 | Complete Genomics WGS | This report |
| DL51 | Complete Genomics WGS | This report |
| DL52 | Complete Genomics WGS | This report |
| DL144 | Illumina WGS | This report |
| DL145 | Illumina WGS | This report |
| DL153 | Illumina WGS | This report |
| DL155 | Illumina WGS | This report |
| DL156 | Illumina WGS | This report |
| DL157 | Illumina WGS | This report |
| DL158 | Illumina WGS | This report |
| DL163 | Illumina WGS | This report |
| DL164 | Illumina WGS | This report |
| DL166 | Illumina WGS | This report |
| DL169 | Illumina WGS | This report |
| DL170 | Illumina WGS | This report |
| DL173 | Illumina WGS | This report |
| DL174 | Illumina WGS | This report |
| DL502 | Illumina WGS | This report |
| DL511 | Illumina WGS | This report |
| DL515 | Illumina WGS | This report |
| DL501 | Illumina WES | This report |
| DL518 | Illumina WES | This report |
| DL521 | Illumina WES | This report |
| DL525 | Illumina WES | This report |
| DL527 | Illumina WES | This report |
| DL532 | Illumina WES | This report |
| DL105 | Complete Genomics WGS | This report |
| DL109 | Complete Genomics WGS | This report |
| DL110 | Complete Genomics WGS | This report |
| DL148 | Illumina WGS | This report |
| DL149 | Illumina WGS | This report |
| DL151 | Illumina WGS | This report |
| DL159 | Illumina WGS | This report |
| DL160 | Illumina WGS | This report |
| DL167 | Illumina WGS | This report |
| DL168 | Illumina WGS | This report |
| DL503 | Illumina WGS | This report |
| DL505 | Illumina WGS | This report |
| DL506 | Illumina WGS | This report |
| DL509 | Illumina WGS | This report |
| DL510 | Illumina WGS | This report |
| DL513 | Illumina WGS | This report |
| DL512 | Illumina WES | This report |
| DL514 | Illumina WES | This report |
| DL517 | Illumina WES | This report |
| DL519 | Illumina WES | This report |
| DL523 | Illumina WES | This report |
| DL524 | Illumina WES | This report |
| DL526 | Illumina WES | This report |
| DL531 | Illumina WES | This report |
| DL29 | Illumina WGS, WES | de Miranda et al., 2014 Blood; |
| | | Qian et al., 2014 Cell |
| DL30 | Illumina WGS, WES | de Miranda et al., 2014 Blood; |
| | | Qian et al., 2014 Cell |
| DL36 | Illumina WGS, WES | de Miranda et al., 2014 Blood; |
| | | Qian et al., 2014 Cell |
| DL43 | Illumina WGS, WES | de Miranda et al., 2014 Blood; |
| | | Qian et al., 2014 Cell |
| DL44 | Illumina WGS, WES | de Miranda et al., 2014 Blood; |
| | | Qian et al., 2014 Cell |
| DL53 | Illumina WGS, WES | de Miranda et al., 2014 Blood; |
| | | Qian et al., 2014 Cell |
| DL55 | Illumina WGS, WES | de Miranda et al., 2014 Blood; |
| | | Qian et al., 2014 Cell |
| DL1 | Illumina WGS, WES | de Miranda et al., 2014 Blood; |
| | | Qian et al., 2014 Cell |
| DL48 | Illumina WGS, WES | de Miranda et al., 2014 Blood; |
| | | Qian et al., 2014 Cell |
| DL57 | Illumina WGS, WES | de Miranda et al., 2014 Blood; |
| | | Qian et al., 2014 Cell |
| DL31 | Illumina WES | de Miranda et al., 2014 Blood |
| DL89 | Illumina WES | de Miranda et al., 2014 Blood |
| DL98 | Illumina WES | de Miranda et al., 2014 Blood |
| DL33 | WES, Complete | de Miranda et al., 2014 Blood |
| | Genomics WGS | |
| DL86 | Illumina WES | de Miranda et al., 2014 Blood |
| DL81 | Illumina WES | de Miranda et al., 2014 Blood |
| DL37 | Illumina WES | de Miranda et al., 2014 Blood |
| DL41 | Illumina WES | de Miranda et al., 2014 Blood |
| DL45 | Illumina WES | de Miranda et al., 2014 Blood |
| DL47 | Illumina WES | de Miranda et al., 2014 Blood |
| DL54 | Illumina WES | de Miranda et al., 2014 Blood |
| DL87 | Illumina WES | de Miranda et al., 2014 Blood |
| DL90 | Illumina WES | de Miranda et al., 2014 Blood |
| DL39 | Illumina WES | de Miranda et al., 2014 Blood |
| DL40 | Illumina WES | de Miranda et al., 2014 Blood |
| DL42 | Illumina WES | de Miranda et al., 2014 Blood |
| DL49 | Illumina WES | de Miranda et al., 2014 Blood |
| DL56 | Illumina WES | de Miranda et al., 2014 Blood |
| DL58 | Illumina WES | de Miranda et al., 2014 Blood |
| DL69 | Illumina WES | de Miranda et al., 2014 Blood |
| DL80 | Illumina WES | de Miranda et al., 2014 Blood |

TABLE 3

| KEGG_Pathway analysis of mutated genes in FIG. 1 | | | | | | | |
|---|---|---|---|---|---|---|---|
| (n = 96) | | | | | | | |
| KEGG_pathway | mber of ge | P value | Bonferroni | Benjamini | FDR | Fisher Exact | Gene involved |
| Hepatitis B | 9 | 0.000 | 0.000 | 0.000 | 0.003 | 0.000 | MYD88, GRB2, BCL2, TP53, NFKBIA, FAS, |
| | | | | | | | MYC, STAT3, PRKCB |
| Measles | 8 | 0.000 | 0.002 | 0.001 | 0.018 | 0.000 | MYD88, CCND3, TP53, NFKBIA, FAS, |
| | | | | | | | TNFAIP3, STAT3, TP73 |
| B cell receptor | 6 | 0.000 | 0.009 | 0.002 | 0.073 | 0.000 | BCL10, PTPN6, LYN, GRB2, NFKBIA, |
| signaling pathway | | | | | | | CD79B |
| Jak-STAT signaling | 7 | 0.000 | 0.036 | 0.005 | 0.190 | 0.000 | PTPN6, CCND3, GRB2, SOCS1, PIM1, MYC, |
| pathway | | | | | | | STAT3 |
| NF-kappa B | 6 | 0.000 | 0.027 | 0.006 | 0.220 | 0.000 | BCL10, BCL2, LYN, NFKBIA, |
| signaling pathway | | | | | | | TNFAIP3, MYD88, |

FDR <0.25 was considered as significant.

TABLE 4
Most significantly and frequently mutated genes in HBsAg+
DLBCLs sequenced in discovery cohort (n = 19)

| | Mutation | | |
|---|---|---|---|
| | frequency | q_ | |
| Gene | (%) | value | Pipeline |
| TMSB4X | 42 | 0.000 | Kan et al |
| FAS | 37 | 0.000 | Kan et al, Oncodriver, Mutsig |
| BCL6 | 37 | 0.000 | Kan et al, Mutsig |
| KLF2 | 32 | 0.000 | Kan et al, Mutsig |
| UBE2A | 32 | 0.000 | Kan et al, Mutsig |
| SGK1 | 32 | 0.000 | Kan et al |
| CD70 | 26 | 0.000 | Kan et al, Oncodriver, Mutsig |
| BTG2 | 26 | 0.000 | Kan et al |
| LAMA1 | 26 | 0.061 | Kan et al |
| PIM1 | 26 | 0.000 | Kan et al |
| CXCR4 | 21 | 0.000 | Kan et al |
| DTX1 | 21 | 0.009 | Kan et al |
| EBF1 | 21 | 0.003 | Kan et al |
| EYS | 21 | 0.066 | Kan et al |
| HIST1H1E | 21 | 0.000 | Kan et al |
| IGLL5 | 21 | 0.000 | Kan et al |
| SOCS1 | 21 | 0.000 | Kan et al |
| TNFRSF14 | 21 | 0.000 | Kan et al |
| TP53 | 21 | 0.000 | Kan et al |
| ZFP36L1 | 21 | 0.001 | Kan et al |
| ETS1 | 16 | 0.008 | Kan et al |
| MLL2 | 16 | 0.008 | Oncodriver |
| SPEN | 16 | 0.001 | Oncodriver |
| ARID1A | 16 | 0.099 | Kan et al, Oncodriver |
| PTPN6 | 16 | 0.024 | Kan et al, Oncodriver |
| ANKRD50 | 16 | 0.056 | Kan et al |
| APBA1 | 16 | 0.056 | Kan et al |
| CDK14 | 16 | 0.005 | Kan et al |
| CDKN1B | 16 | 0.001 | Kan et al |
| EIF4G1 | 16 | 0.069 | Kan et al |
| GALNTL4 | 16 | 0.021 | Kan et al |
| IKZE3 | 16 | 0.009 | Kan et al |
| LPHN2 | 16 | 0.056 | Kan et al |
| MSL2 | 16 | 0.055 | Kan et al |
| NLRC5 | 16 | 0.077 | Kan et al |
| OSBPL10 | 16 | 0.035 | Kan et al |
| STAT3 | 16 | 0.026 | Kan et al |
| TP73 | 16 | 0.035 | Kan et al |
| PHIP | 11 | 0.080 | Oncodriver |
| BCL10 | 11 | 0.010 | Kan et al, Oncodriver |
| ABCC12 | 11 | 0.088 | Kan et al |
| ACAD10 | 11 | 0.081 | Kan et al |
| ANKRD30B | 11 | 0.081 | Kan et al |
| B2M | 11 | 0.003 | Kan et al |
| BLM | 11 | 0.083 | Kan et al |
| BTG1 | 11 | 0.008 | Kan et al |
| C7 | 11 | 0.063 | Kan et al |
| CAPN10 | 11 | 0.067 | Kan et al |
| CEP128 | 11 | 0.073 | Kan et al |
| CHRM3 | 11 | 0.057 | Kan et al |
| CNBD1 | 11 | 0.032 | Kan et al |
| CNTLN | 11 | 0.084 | Kan et al |
| CNTN3 | 11 | 0.067 | Kan et al |
| COBL | 11 | 0.088 | Kan et al |
| COL8A1 | 11 | 0.061 | Kan et al |
| COPS8 | 11 | 0.009 | Kan et al |
| DCDC5 | 11 | 0.064 | Kan et al |
| DDX3X | 11 | 0.018 | Kan et al |
| DENND3 | 11 | 0.091 | Kan et al |
| DIXDC1 | 11 | 0.060 | Kan et al |
| DSG3 | 11 | 0.068 | Kan et al |
| DUSP2 | 11 | 0.052 | Kan et al |
| EEF1A1 | 11 | 0.043 | Kan et al |
| EHD1 | 11 | 0.063 | Kan et al |
| EIF3A | 11 | 0.093 | Kan et al |
| EPH43 | 11 | 0.067 | Kan et al |
| ERF | 11 | 0.061 | Kan et al |
| FBXL5 | 11 | 0.056 | Kan et al |
| FEZF1 | 11 | 0.056 | Kan et al |
| FOXO1 | 11 | 0.066 | Kan et al |
| GABRA1 | 11 | 0.038 | Kan et al |
| GAD1 | 11 | 0.056 | Kan et al |
| GBA3 | 11 | 0.038 | Kan et al |
| GET4 | 11 | 0.045 | Kan et al |
| GFRA2 | 11 | 0.056 | Kan et al |
| GRIK4 | 11 | 0.084 | Kan et al |
| GRM1 | 11 | 0.088 | Kan et al |
| GRM2 | 11 | 0.079 | Kan et al |
| GRM7 | 11 | 0.075 | Kan et al |
| HCK | 11 | 0.056 | Kan et al |
| HHIPL1 | 11 | 0.087 | Kan et al |
| HIST1H1B | 11 | 0.021 | Kan et al |
| HIST1H1C | 11 | 0.019 | Kan et al |
| HIST1H2BC | 11 | 0.008 | Kan et al |
| HIST1H2BN | 11 | 0.008 | Kan et al |
| HLA-DMB | 11 | 0.017 | Kan et al |
| HOX49 | 11 | 0.038 | Kan et al |
| HSP90AA1 | 11 | 0.065 | Kan et al |
| IRF8 | 11 | 0.056 | Kan et al |
| IRX6 | 11 | 0.056 | Kan et al |
| KCNK10 | 11 | 0.057 | Kan et al |
| KCTD15 | 11 | 0.038 | Kan et al |
| KLHL6 | 11 | 0.061 | Kan et al |
| KRAS | 11 | 0.006 | Kan et al |
| LAMA | 11 | 0.038 | Kan et al |
| LRIG3 | 11 | 0.079 | Kan et al |
| LRRN3 | 11 | 0.056 | Kan et al |
| LTF | 11 | 0.065 | Kan et al |
| MAGEC3 | 11 | 0.056 | Kan et al |
| MAS1 | 11 | 0.027 | Kan et al |
| MMEL1 | 11 | 0.072 | Kan et al |
| MMP16 | 11 | 0.056 | Kan et al |
| MYO3B | 11 | 0.084 | Kan et al |
| NCAM2 | 11 | 0.061 | Kan et al |
| NEK11 | 11 | 0.056 | Kan et al |
| NFKBIA | 11 | 0.033 | Kan et al |
| NOC3L | 11 | 0.059 | Kan et al |
| NR1H4 | 11 | 0.043 | Kan et al |
| ONECUT1 | 11 | 0.057 | Kan et al |
| OR14A16 | 11 | 0.017 | Kan et al |
| OR52E2 | 11 | 0.020 | Kan et al |
| OR6C68 | 11 | 0.015 | Kan et al |
| PCDH10 | 11 | 0.091 | Kan et al |
| PCDHA13 | 11 | 0.087 | Kan et al |
| PCDHB2 | 11 | 0.076 | Kan et al |
| PGM2L | 11 | 0.056 | Kan et al |
| PHF2 | 11 | 0.087 | Kan et al |
| PHF21A | 11 | 0.057 | Kan et al |
| PRICKLE2 | 11 | 0.069 | Kan et al |
| PRKCB | 11 | 0.061 | Kan et al |
| PRPF4B | 11 | 0.067 | Kan et al |
| PRR16 | 11 | 0.018 | Kan et al |
| PTPRG | 11 | 0.094 | Kan et al |
| RNF150 | 11 | 0.056 | Kan et al |
| RRAGC | 11 | 0.038 | Kan et al |
| SCIN | 11 | 0.060 | Kan et al |
| SEC31B | 11 | 0.079 | Kan et al |
| SEAMA3E | 11 | 0.061 | Kan et al |
| SERPINB12 | 11 | 0.032 | Kan et al |
| SGSH | 11 | 0.061 | Kan et al |
| SKP1 | 11 | 0.004 | Kan et al |
| SLC15A4 | 11 | 0.065 | Kan et al |
| SLC24A1 | 11 | 0.075 | Kan et al |
| SLITRK3 | 11 | 0.067 | Kan et al |
| SLITRK5 | 11 | 0.082 | Kan et al |
| SLITRK6 | 11 | 0.061 | Kan et al |
| SPEF2 | 11 | 0.097 | Kan et al |
| STARD8 | 11 | 0.085 | Kan et al |
| SYCP2 | 11 | 0.082 | Kan et al |
| TBL1XR1 | 11 | 0.041 | Kan et al |
| TGFBR2 | 11 | 0.056 | Kan et al |
| TNFAIP3 | 11 | 0.066 | Kan et al |
| TNR | 11 | 0.094 | Kan et al |
| TPTE | 11 | 0.050 | Kan et al |
| TRIL | 11 | 0.088 | Kan et al |
| TRPV4 | 11 | 0.079 | Kan et al |
| TSC22D1 | 11 | 0.075 | Kan et al |
| TSHZ1 | 11 | 0.085 | Kan et al |
| UHRF1BP1 | 11 | 0.087 | Kan et al |
| UHRF2 | 11 | 0.061 | Kan et al |
| VMP1 | 11 | 0.032 | Kan et al |
| ZNF454 | 11 | 0.041 | Kan et al |
| ZNF471 | 11 | 0.049 | Kan et al |
| ZNF608 | 11 | 0.094 | Kan et al |
| ZNF814 | 11 | 0.061 | Kan et al |
| ZSWIM6 | 11 | 0.096 | Kan et al |

q < 0.1 was considered as significant.

TABLE 4
Comparison of mutation frequency between HBsAg+ (n = 19) and HBsAg− (n = 77)
DLBCLs in the discovery cohort

| | HBs | | | HBs | | | |
|---|---|---|---|---|---|---|---|
| | Ag+ | | | Ag− | | | |
| | No. of | | Mutation | No. of | | Mutation | |
| | mutated | total | frequency | mutated | total | frequency | |
| gene | samples | No. | (%) | samples | No. | (%) | p_value |
| RYR3 | 4 | 19 | 21 | 0 | 77 | 0 | 0.000 |
| UBE2A | 6 | 19 | 32 | 3 | 77 | 4 | 0.000 |
| LAMA1 | 5 | 19 | 26 | 2 | 77 | 3 | 0.000 |
| TMSB4X | 8 | 19 | 42 | 7 | 77 | 9 | 0.000 |
| CDK14 | 3 | 19 | 16 | 0 | 77 | 0 | 0.000 |
| CDKN1B | 3 | 19 | 16 | 0 | 77 | 0 | 0.000 |
| RYR1 | 3 | 19 | 16 | 0 | 77 | 0 | 0.000 |
| DNAH11 | 4 | 19 | 21 | 1 | 77 | 1 | 0.001 |
| BCL6 | 7 | 19 | 37 | 7 | 77 | 9 | 0.002 |
| CXCR4 | 4 | 19 | 21 | 2 | 77 | 3 | 0.003 |
| APBA1 | 3 | 19 | 16 | 1 | 77 | 1 | 0.005 |
| FLG | 3 | 19 | 16 | 1 | 77 | 1 | 0.005 |
| GALNTL4 | 3 | 19 | 16 | 1 | 77 | 1 | 0.005 |
| IKZF3 | 3 | 19 | 16 | 1 | 77 | 1 | 0.005 |
| NLRC5 | 3 | 19 | 16 | 1 | 77 | 1 | 0.005 |
| FAS | 7 | 19 | 37 | 9 | 77 | 12 | 0.008 |
| EYS | 4 | 19 | 21 | 3 | 77 | 4 | 0.010 |
| KLF2 | 6 | 19 | 32 | 8 | 77 | 10 | 0.019 |
| DDX3X | 3 | 19 | 16 | 2 | 77 | 3 | 0.020 |
| EIF4G1 | 3 | 19 | 16 | 2 | 77 | 3 | 0.020 |
| LPHN2 | 3 | 19 | 16 | 2 | 77 | 3 | 0.020 |
| NEB | 3 | 19 | 16 | 2 | 77 | 3 | 0.020 |
| EBF1 | 4 | 19 | 21 | 4 | 77 | 5 | 0.025 |
| SGK1 | 6 | 19 | 32 | 9 | 77 | 12 | 0.032 |
| ABCC3 | 2 | 19 | 11 | 1 | 77 | 1 | 0.038 |
| BLM | 2 | 19 | 11 | 1 | 77 | 1 | 0.038 |
| BSN | 2 | 19 | 11 | 1 | 77 | 1 | 0.038 |
| CEP128 | 2 | 19 | 11 | 1 | 77 | 1 | 0.038 |
| CHRM3 | 2 | 19 | 11 | 1 | 77 | 1 | 0.038 |
| CNBD1 | 2 | 19 | 11 | 1 | 77 | 1 | 0.038 |
| COL8A1 | 2 | 19 | 11 | 1 | 77 | 1 | 0.038 |
| DENND3 | 2 | 19 | 11 | 1 | 77 | 1 | 0.038 |
| DNAH7 | 2 | 19 | 11 | 1 | 77 | 1 | 0.038 |
| DPP4 | 2 | 19 | 11 | 1 | 77 | 1 | 0.038 |
| DSG3 | 2 | 19 | 11 | 1 | 77 | 1 | 0.038 |
| EIF3A | 2 | 19 | 11 | 1 | 77 | 1 | 0.038 |
| EP400 | 2 | 19 | 11 | 1 | 77 | 1 | 0.038 |
| EPHA3 | 2 | 19 | 11 | 1 | 77 | 1 | 0.038 |
| FEZF1 | 2 | 19 | 11 | 1 | 77 | 1 | 0.038 |
| GAD1 | 2 | 19 | 11 | 1 | 77 | 1 | 0.038 |
| GRM7 | 2 | 19 | 11 | 1 | 77 | 1 | 0.038 |
| HCK | 2 | 19 | 11 | 1 | 77 | 1 | 0.038 |
| HHIPL1 | 2 | 19 | 11 | 1 | 77 | 1 | 0.038 |
| HSPA8 | 2 | 19 | 11 | 1 | 77 | 1 | 0.038 |
| KCNK10 | 2 | 19 | 11 | 1 | 77 | 1 | 0.038 |
| KLHL6 | 2 | 19 | 11 | 1 | 77 | 1 | 0.038 |
| LAMB4 | 2 | 19 | 11 | 1 | 77 | 1 | 0.038 |
| LMX1A | 2 | 19 | 11 | 1 | 77 | 1 | 0.038 |
| LTF | 2 | 19 | 11 | 1 | 77 | 1 | 0.038 |
| MAGEC3 | 2 | 19 | 11 | 1 | 77 | 1 | 0.038 |
| MAP1B | 2 | 19 | 11 | 1 | 77 | 1 | 0.038 |
| MKI67 | 2 | 19 | 11 | 1 | 77 | 1 | 0.038 |
| MLL | 2 | 19 | 11 | 1 | 77 | 1 | 0.038 |
| MMEL1 | 2 | 19 | 11 | 1 | 77 | 1 | 0.038 |
| MMP16 | 2 | 19 | 11 | 1 | 77 | 1 | 0.038 |
| MY03B | 2 | 19 | 11 | 1 | 77 | 1 | 0.038 |
| NOC3L | 2 | 19 | 11 | 1 | 77 | 1 | 0.038 |
| ONECUT1 | 2 | 19 | 11 | 1 | 77 | 1 | 0.038 |
| PCDH10 | 2 | 19 | 11 | 1 | 77 | 1 | 0.038 |
| PRR16 | 2 | 19 | 11 | 1 | 77 | 1 | 0.038 |
| RTTN | 2 | 19 | 11 | 1 | 77 | 1 | 0.038 |
| SEMA3E | 2 | 19 | 11 | 1 | 77 | 1 | 0.038 |
| SGSH | 2 | 19 | 11 | 1 | 77 | 1 | 0.038 |
| SLITRK5 | 2 | 19 | 11 | 1 | 77 | 1 | 0.038 |
| SYCP2 | 2 | 19 | 11 | 1 | 77 | 1 | 0.038 |
| TNS1 | 2 | 19 | 11 | 1 | 77 | 1 | 0.038 |
| TRIL | 2 | 19 | 11 | 1 | 77 | 1 | 0.038 |
| TRRAP | 2 | 19 | 11 | 1 | 77 | 1 | 0.038 |
| TSC22D1 | 2 | 19 | 11 | 1 | 77 | 1 | 0.038 |
| TSHZ1 | 2 | 19 | 11 | 1 | 77 | 1 | 0.038 |
| UHRF2 | 2 | 19 | 11 | 1 | 77 | 1 | 0.038 |
| YLPM1 | 2 | 19 | 11 | 1 | 77 | 1 | 0.038 |
| ZSWIM6 | 2 | 19 | 11 | 1 | 77 | 1 | 0.038 |

TABLE 6
Genes included in lymphochip

| AKT1 | BTK | EP300 | IKBKG | JAK2 | MAPK1 | MYC | PIK3CA | STAT3 |
|---|---|---|---|---|---|---|---|---|
| BCL2 | CHUK | EZH2 | IRAK1 | JAK3 | MLL2 | MYD88 | PRKCB | STAT6 |
| BCL6 | CREBBP | IKBKB | IRF4 | MALT1 | MTOR | NFKB1 | SPIB | SYK |
| AICDA | BRD4 | CHRM3 | ETV6 | IRF8 | MLH3 | PIK3CD | RHOH | TMEM30A |
| APC | BRWD3 | CIITA | EXO1 | ITGA2 | MLL3 | PIK3CG | ROBO1 | TMSB4X |
| APOB | BTG1 | CSK | FANCD2 | ITGAV | MPEG1 | PIK3R1 | ROBO2 | TNFAIP3 |
| APOBEC3B | BTG2 | CXCL5 | FAS | ITGB3 | MSH2 | PIM1 | ROR2 | TNFRSF14 |
| ARGHAP26 | CARD11 | CXCR4 | FBXO11 | ITPKB | MSH6 | PLCG2 | RRAGC | TNFSF13B |
| ARHGAP32 | CCND1 | DCLRE1C | FGFR3 | JAG1 | MSL2 | POLR3A | SIPR1 | TP53 |
| ARID1A | CCND3 | DDB1 | FLT1 | JUNB | NFKB2 | POU2F2 | SIPR2 | TP63 |
| ARID5B | CD28 | DDX3X | FOXO1 | KDM2B | NFKBIA | PRDM1 | SCYL1 | TP73 |
| ATM | CD36 | DDX42 | FOXP1 | KLF2 | NFKBIB | PRKCD | SETD2 | TRAF2 |
| ATRX | CD40 | DLC1 | GNA13 | KLF4 | NFKBID | PRKCE | SGK1 | TRAF3 |
| B2M | CD58 | DTX1 | GNAI2 | KLHL6 | NFKBIE | PRKCQ | SMARCA4 | UBE2A |
| BAX | CD70 | DUSP2 | GPR37 | KRAS | NFKBIZ | PRKDC | SMARCC2 | VMP1 |
| BCL10 | CD79A | EBF1 | HIST1H1C | LIFR | NGFR | PRPF4B | SOCS1 | VPS39 |
| BCL11A | CD79B | EEF1A1 | HIST1H1E | LRP5 | NOTCH1 | PTEN | SOCS5 | WHSC1 |
| BCL7A | CD83 | EHD1 | HIST1H2AC | LTBP2 | NOTCH2 | RB1 | TAF1 | XRCC5 |
| BCR | CDK14 | EIF2AK2 | HIST1H2AM | LYN | NRAS | REL | TAF4B | XRCC6 |
| BIRC3 | CDKN1B | EIF4A2 | ID3 | MAP3K4 | PARP1 | RELA | TAGAP | ZFP36L1 |
| BLM | CDKN2A | EIR4G1 | IKBKE | MCL1 | PAX5 | RELB | TBLIXR1 | |
| BRAF | CDKN2B | ERBB2 | IKZF1 | MEF2B | PBX1 | RFTN1 | TCF3 | |
| BRCA1 | CHD3 | ETS1 | IKZF2 | MKI67 | PDCD11 | RFXANK | TET2 | |
| BRCA2 | CHEK2 | ETV1 | IKZF3 | MLH1 | PIK3CB | RHOA | TLR2 | |

TABLE 7
Recurrently mutated genes
in HBsAg+ DLBCLs (n = 41)

| | | Mutated | |
|---|---|---|---|
| | | samples in | Mutation |
| | In | HBsAg+ | frequency |
| Gene | FIG. 1 | DLBCL | (%) |
| CD70 | Yes | 13 | 32 |
| KLF2 | Yes | 13 | 32 |
| BCL6 | Yes | 12 | 29 |
| TNFRSF14 | Yes | 12 | 29 |
| TAISB4X | Yes | 12 | 29 |
| BTG2 | Yes | 12 | 29 |
| PIM1 | Yes | 12 | 29 |
| FAS | Yes | 11 | 27 |
| SGK1 | Yes | 10 | 24 |
| SOCS1 | Yes | 10 | 24 |
| UBE2A | Yes | 9 | 22 |
| DTX1 | Yes | 9 | 22 |
| ZFP36L1 | Yes | 8 | 20 |
| KMT2D | Yes | 8 | 20 |
| ITPKB | Yes | 8 | 20 |
| NFKBIE | Yes | 7 | 17 |
| STAT3 | Yes | 7 | 17 |
| EBF1 | Yes | 7 | 17 |
| CXCR4 | Yes | 6 | 15 |
| CD58 | No | 6 | 15 |
| TP53 | Yes | 6 | 15 |
| NOTCH1 | No | 6 | 15 |
| CARD11 | No | 6 | 15 |
| HIST1H1E | Yes | 6 | 15 |
| MYD88 | Yes | 6 | 15 |
| MKI67 | No | 5 | 12 |
| RRAGC | No | 5 | 12 |
| IKZF3 | No | 5 | 12 |
| MSL2 | Yes | 5 | 12 |
| EHD1 | No | 5 | 12 |
| PRKDC | No | 5 | 12 |
| KLHL6 | No | 5 | 12 |
| ARID1A | No | 5 | 12 |
| BTG | Yes | 5 | 12 |
| TNFAIP3 | Yes | 5 | 12 |
| TBL1XR1 | Yes | 5 | 12 |
| DUSP2 | Yes | 5 | 12 |
| NOTCH2 | Yes | 5 | 12 |
| TP63 | No | 4 | 10 |
| TP73 | Yes | 4 | 10 |
| FOXO1 | No | 4 | 10 |
| WHSC1 | No | 4 | 10 |
| ATM | No | 4 | 10 |
| ETS1 | Yes | 4 | 10 |
| APOB | No | 4 | 10 |
| HIST1H1C | Yes | 4 | 10 |
| ETV6 | Yes | 4 | 10 |
| MPEG1 | Yes | 4 | 10 |
| TRAF3 | No | 3 | 7 |
| ERBB2 | No | 3 | 7 |
| CDKN1B | No | 3 | 7 |
| CDK14 | No | 3 | 7 |
| BCL11A | No | 3 | 7 |
| CHRM3 | No | 3 | 7 |
| CD79B | Yes | 3 | 7 |
| SMARCA4 | No | 3 | 7 |
| LYN | Yes | 3 | 7 |
| PRKCD | No | 3 | 7 |
| TCF3 | No | 3 | 7 |
| CSK | No | 3 | 7 |
| CD83 | No | 3 | 7 |
| BLM | No | 3 | 7 |
| BCL10 | Yes | 3 | 7 |
| FLT1 | No | 3 | 7 |
| EIF4G1 | No | 3 | 7 |
| PRDM1 | Yes | 3 | 7 |
| HIST1H2AM | Yes | 3 | 7 |
| LIFR | No | 3 | 7 |
| DDX3X | No | 3 | 7 |
| TET2 | No | 3 | 7 |
| MYC | Yes | 3 | 7 |

TABLE 8

| Comparison of mutation frequency | | | | | | | | |
|---|---|---|---|---|---|---|---|---|
| between HBsAg+ (n = 41) and | | | | | | | | |
| HBsAg− (n = 163) DLBCLs | | | | | Mutation | Mutation | | |
| | | | No. of | No. of | frequency | frequency | | |
| | | No. of | mutated | mutated | in | in | HBV_ | HBV_ |
| | Total | mutated | samples in | samples in | HBsAg+ | HBsAg− | ChiSq | Fisher |
| Gene | samples | samples | HBsAg+ | HBsAg− | (%) | (%) | p_value | p_value |
| BCL6 | 204 | 28 | 13 | 15 | 32 | 9 | 0.000 | 0.001 |
| UBE2A | 204 | 16 | 9 | 7 | 22 | 4 | 0.000 | 0.001 |
| TNFRSF14 | 204 | 27 | 12 | 15 | 29 | 9 | 0.001 | 0.002 |
| CD70 | 204 | 31 | 13 | 18 | 32 | 11 | 0.001 | 0.003 |
| FAS | 204 | 25 | 11 | 14 | 27 | 9 | 0.001 | 0.006 |
| KLF2 | 204 | 33 | 13 | 20 | 32 | 12 | 0.003 | 0.007 |
| TRAF3 | 204 | 3 | 3 | 0 | 7 | 0 | 0.001 | 0.008 |
| MKI67 | 204 | 8 | 5 | 3 | 12 | 2 | 0.002 | 0.009 |
| RRAGC | 204 | 8 | 5 | 3 | 12 | 2 | 0.002 | 0.009 |
| CHEK2 | 204 | 6 | 4 | 2 | 10 | 1 | 0.004 | 0.016 |
| CXCR4 | 204 | 12 | 6 | 6 | 15 | 4 | 0.008 | 0.017 |
| TMSB4X | 204 | 33 | 12 | 21 | 29 | 13 | 0.011 | 0.017 |
| CDK14 | 204 | 4 | 3 | 1 | 7 | 1 | 0.006 | 0.026 |
| CDKN1B | 204 | 4 | 3 | 1 | 7 | 1 | 0.006 | 0.026 |
| ERBB2 | 204 | 4 | 3 | 1 | 7 | 1 | 0.006 | 0.026 |
| IKZF3 | 204 | 10 | 5 | 5 | 12 | 3 | 0.016 | 0.030 |
| MSL2 | 204 | 10 | 5 | 5 | 12 | 3 | 0.016 | 0.030 |
| ZFP36L1 | 204 | 20 | 8 | 12 | 20 | 7 | 0.019 | 0.035 |
| NFKBIE | 204 | 17 | 7 | 10 | 17 | 6 | 0.024 | 0.050 |
| STAT3 | 204 | 18 | 7 | 11 | 17 | 7 | 0.037 | 0.059 |
| PRPF4B | 204 | 2 | 2 | 0 | 5 | 0 | 0.005 | 0.040 |
| BCL11A | 204 | 5 | 3 | 2 | 7 | 1 | 0.024 | 0.056 |
| EBF1 | 204 | 19 | 7 | 12 | 17 | 7 | 0.056 | 0.071 |
| BCL7A | 204 | 13 | 0 | 13 | 0 | 8 | 0.062 | 0.075 |
| APC | 204 | 13 | 0 | 13 | 0 | 8 | 0.062 | 0.075 |
| B2M | 204 | 28 | 2 | 26 | 5 | 16 | 0.066 | 0.077 |
| SGK1 | 204 | 30 | 10 | 20 | 24 | 12 | 0.050 | 0.081 |
| SOCS1 | 204 | 32 | 10 | 22 | 24 | 13 | 0.086 | 0.096 |
| CHRM3 | 204 | 6 | 3 | 3 | 7 | 2 | 0.064 | 0.097 |
| JAK2 | 204 | 3 | 2 | 1 | 5 | 1 | 0.043 | 0.104 |
| TNFSF13B | 204 | 3 | 2 | 1 | 5 | 1 | 0.043 | 0.104 |
| TP63 | 204 | 9 | 4 | 5 | 10 | 3 | 0.031 | 0.117 |
| TP73 | 204 | 10 | 4 | 6 | 10 | 4 | 0.107 | 0.117 |
| EHD1 | 204 | 13 | 5 | 8 | 12 | 5 | 0.088 | 0.143 |
| PRKDC | 204 | 14 | 5 | 9 | 12 | 6 | 0.131 | 0.163 |
| BRCA1 | 204 | 4 | 2 | 2 | 5 | 1 | 0.132 | 0.181 |
| EXO1 | 204 | 4 | 2 | 2 | 5 | 1 | 0.132 | 0.181 |
| DDB1 | 204 | 1 | 1 | 0 | 2 | 0 | 0.046 | 0.201 |
| RHOH | 204 | 1 | 1 | 0 | 2 | 0 | 0.046 | 0.201 |
| LYN | 204 | 8 | 3 | 5 | 7 | 3 | 0.210 | 0.202 |
| SMARCA4 | 204 | 8 | 3 | 5 | 7 | 3 | 0.210 | 0.202 |
| PRKCD | 204 | 8 | 3 | 5 | 7 | 3 | 0.210 | 0.202 |
| CIITA | 204 | 16 | 1 | 15 | 2 | 9 | 0.150 | 0.203 |
| BTG2 | 204 | 44 | 12 | 32 | 29 | 20 | 0.180 | 0.204 |
| ROBO1 | 204 | 17 | 1 | 16 | 2 | 10 | 0.127 | 0.204 |
| DLC1 | 204 | 9 | 0 | 9 | 0 | 6 | 0.124 | 0.209 |
| CD79B | 204 | 30 | 3 | 27 | 7 | 17 | 0.135 | 0.215 |
| CD58 | 204 | 20 | 6 | 14 | 15 | 9 | 0.245 | 0.247 |
| CREBBP | 204 | 21 | 2 | 19 | 5 | 12 | 0.202 | 0.260 |
| FOXO1 | 204 | 12 | 4 | 8 | 10 | 5 | 0.238 | 0.265 |
| WHSC1 | 204 | 13 | 4 | 9 | 10 | 6 | 0.321 | 0.300 |
| KLHL6 | 204 | 16 | 5 | 11 | 12 | 7 | 0.246 | 0.325 |
| PARP1 | 204 | 6 | 2 | 4 | 5 | 2 | 0.412 | 0.347 |
| ARHGAP32 | 204 | 6 | 2 | 4 | 5 | 2 | 0.412 | 0.347 |
| ID3 | 204 | 6 | 2 | 4 | 5 | 2 | 0.412 | 0.347 |
| NFKBIA | 204 | 6 | 2 | 4 | 5 | 2 | 0.412 | 0.347 |
| EP300 | 204 | 7 | 0 | 7 | 0 | 4 | 0.177 | 0.349 |
| EZH2 | 204 | 7 | 0 | 7 | 0 | 4 | 0.177 | 0.349 |
| PDCD11 | 204 | 7 | 0 | 7 | 0 | 4 | 0.177 | 0.349 |
| ROR2 | 204 | 8 | 0 | 8 | 0 | 5 | 0.148 | 0.362 |
| PRKCQ | 204 | 2 | 1 | 1 | 2 | 1 | 0.289 | 0.362 |
| PIK3CA | 204 | 2 | 1 | 1 | 2 | 1 | 0.289 | 0.362 |
| ITGB3 | 204 | 2 | 1 | 1 | 2 | 1 | 0.289 | 0.362 |
| CD28 | 204 | 2 | 1 | 1 | 2 | 1 | 0.289 | 0.362 |
| ARHGAP26 | 204 | 2 | 1 | 1 | 2 | 1 | 0.289 | 0.362 |
| ARID1A | 204 | 18 | 5 | 13 | 12 | 8 | 0.394 | 0.369 |
| ROBO2 | 204 | 19 | 2 | 17 | 5 | 10 | 0.274 | 0.376 |
| CCND3 | 204 | 19 | 2 | 17 | 5 | 10 | 0.274 | 0.376 |
| TCF3 | 204 | 9 | 3 | 6 | 7 | 4 | 0.311 | 0.389 |
| CSK | 204 | 9 | 3 | 6 | 7 | 4 | 0.311 | 0.389 |
| CD83 | 204 | 9 | 3 | 6 | 7 | 4 | 0.311 | 0.389 |
| NOTCH1 | 204 | 22 | 6 | 16 | 15 | 10 | 0.374 | 0.400 |
| CARD11 | 204 | 23 | 6 | 17 | 15 | 10 | 0.447 | 0.419 |
| BLM | 204 | 10 | 3 | 7 | 7 | 4 | 0.423 | 0.424 |
| BCL10 | 204 | 10 | 3 | 7 | 7 | 4 | 0.423 | 0.424 |
| FLT1 | 204 | 11 | 3 | 8 | 7 | 5 | 0.542 | 0.465 |
| EIF4G1 | 204 | 11 | 3 | 8 | 7 | 5 | 0.542 | 0.465 |
| BCL2 | 204 | 12 | 1 | 11 | 2 | 7 | 0.295 | 0.466 |
| MSH2 | 204 | 13 | 1 | 12 | 2 | 7 | 0.249 | 0.473 |
| FGFR3 | 204 | 3 | 1 | 2 | 2 | 1 | 0.564 | 0.492 |
| MLH1 | 204 | 3 | 1 | 2 | 2 | 1 | 0.564 | 0.492 |
| TAF4B | 204 | 3 | 1 | 2 | 2 | 1 | 0.564 | 0.492 |
| PIK3R1 | 204 | 3 | 1 | 2 | 2 | 1 | 0.564 | 0.492 |
| CXCL5 | 204 | 3 | 1 | 2 | 2 | 1 | 0.564 | 0.492 |
| DCLRE1C | 204 | 3 | 1 | 2 | 2 | 1 | 0.564 | 0.492 |
| DTX1 | 204 | 37 | 9 | 28 | 22 | 17 | 0.478 | 0.499 |
| ATM | 204 | 15 | 4 | 11 | 10 | 7 | 0.510 | 0.508 |
| ETS1 | 204 | 15 | 4 | 11 | 10 | 7 | 0.510 | 0.508 |
| HIST1H1C | 204 | 16 | 4 | 12 | 10 | 7 | 0.610 | 0.534 |
| KMT2D | 204 | 50 | 8 | 42 | 20 | 26 | 0.405 | 0.543 |
| CD79A | 204 | 5 | 0 | 5 | 0 | 3 | 0.256 | 0.585 |
| JAK3 | 204 | 5 | 0 | 5 | 0 | 3 | 0.256 | 0.585 |
| SCYL1 | 204 | 5 | 0 | 5 | 0 | 3 | 0.256 | 0.585 |
| KDM2B | 204 | 5 | 0 | 5 | 0 | 3 | 0.256 | 0.585 |
| PIK3CB | 204 | 5 | 0 | 5 | 0 | 3 | 0.256 | 0.585 |
| SIPR2 | 204 | 5 | 0 | 5 | 0 | 3 | 0.256 | 0.585 |
| PIK3CG | 204 | 4 | 0 | 4 | 0 | 2 | 0.311 | 0.585 |
| FBXO11 | 204 | 4 | 0 | 4 | 0 | 2 | 0.311 | 0.585 |
| TRAF2 | 204 | 4 | 0 | 4 | 0 | 2 | 0.311 | 0.585 |
| RB1 | 204 | 4 | 0 | 4 | 0 | 2 | 0.311 | 0.585 |
| PIK3CD | 204 | 4 | 0 | 4 | 0 | 2 | 0.311 | 0.585 |
| BRD4 | 204 | 4 | 0 | 4 | 0 | 2 | 0.311 | 0.585 |
| LTBP2 | 204 | 6 | 0 | 6 | 0 | 4 | 0.212 | 0.602 |
| ITGAV | 204 | 6 | 0 | 6 | 0 | 4 | 0.212 | 0.602 |
| POU2F2 | 204 | 6 | 0 | 6 | 0 | 4 | 0.212 | 0.602 |
| APOB | 204 | 26 | 4 | 22 | 10 | 13 | 0.521 | 0.611 |
| ATRX | 204 | 7 | 2 | 5 | 5 | 3 | 0.569 | 0.630 |
| PAX5 | 204 | 7 | 2 | 5 | 5 | 3 | 0.569 | 0.630 |
| EEF1A1 | 204 | 7 | 2 | 5 | 5 | 3 | 0.569 | 0.630 |
| KRAS | 204 | 7 | 2 | 5 | 5 | 3 | 0.569 | 0.630 |
| BTG1 | 204 | 32 | 5 | 27 | 12 | 17 | 0.492 | 0.633 |
| SMARCC2 | 204 | 8 | 2 | 6 | 5 | 4 | 0.724 | 0.663 |
| FANCD2 | 204 | 8 | 2 | 6 | 5 | 4 | 0.724 | 0.663 |
| TP53 | 204 | 42 | 7 | 35 | 17 | 21 | 0.533 | 0.667 |
| CD36 | 204 | 10 | 1 | 9 | 2 | 6 | 0.414 | 0.690 |
| LRP5 | 204 | 10 | 1 | 9 | 2 | 6 | 0.414 | 0.690 |
| ARID5B | 204 | 10 | 1 | 9 | 2 | 6 | 0.414 | 0.690 |
| GPR37 | 204 | 9 | 1 | 8 | 2 | 5 | 0.491 | 0.690 |
| BRCA2 | 204 | 9 | 1 | 8 | 2 | 5 | 0.491 | 0.690 |
| TAF1 | 204 | 9 | 1 | 8 | 2 | 5 | 0.491 | 0.690 |
| JUNB | 204 | 9 | 1 | 8 | 2 | 5 | 0.491 | 0.690 |
| CDKN2A | 204 | 9 | 1 | 8 | 2 | 5 | 0.491 | 0.690 |
| RFTN1 | 204 | 11 | 1 | 10 | 2 | 6 | 0.349 | 0.698 |
| PIM1 | 204 | 55 | 12 | 43 | 29 | 26 | 0.710 | 0.698 |
| LIFR | 204 | 13 | 3 | 10 | 7 | 6 | 0.782 | 0.727 |
| DDX3X | 204 | 13 | 3 | 10 | 7 | 6 | 0.782 | 0.727 |
| GNA13 | 204 | 15 | 2 | 13 | 5 | 8 | 0.497 | 0.740 |
| ETV6 | 204 | 18 | 4 | 14 | 10 | 9 | 0.814 | 0.763 |
| PRDM1 | 204 | 19 | 3 | 16 | 7 | 10 | 0.623 | 0.770 |
| TNFAIP3 | 204 | 23 | 5 | 18 | 12 | 11 | 0.835 | 0.787 |
| HIST1H1E | 204 | 35 | 6 | 29 | 15 | 18 | 0.632 | 0.817 |
| ITPKB | 204 | 36 | 8 | 28 | 20 | 17 | 0.726 | 0.819 |
| REL | 204 | 3 | 0 | 3 | 0 | 2 | 0.381 | 1.000 |
| APOBEC3B | 204 | 3 | 0 | 3 | 0 | 2 | 0.381 | 1.000 |
| DDX42 | 204 | 3 | 0 | 3 | 0 | 2 | 0.381 | 1.000 |
| RFXANK | 204 | 3 | 0 | 3 | 0 | 2 | 0.381 | 1.000 |
| SOCS5 | 204 | 3 | 0 | 3 | 0 | 2 | 0.381 | 1.000 |
| RELB | 204 | 2 | 0 | 2 | 0 | 1 | 0.476 | 1.000 |
| PBX1 | 204 | 2 | 0 | 2 | 0 | 1 | 0.476 | 1.000 |
| NRAS | 204 | 2 | 0 | 2 | 0 | 1 | 0.476 | 1.000 |
| JAG1 | 204 | 2 | 0 | 2 | 0 | 1 | 0.476 | 1.000 |
| SYK | 204 | 2 | 0 | 2 | 0 | 1 | 0.476 | 1.000 |
| XRCC5 | 204 | 2 | 0 | 2 | 0 | 1 | 0.476 | 1.000 |
| NFKBIZ | 204 | 2 | 0 | 2 | 0 | 1 | 0.476 | 1.000 |
| AICDA | 204 | 2 | 0 | 2 | 0 | 1 | 0.476 | 1.000 |
| BTK | 204 | 2 | 0 | 2 | 0 | 1 | 0.476 | 1.000 |
| GNA12 | 204 | 8 | 1 | 7 | 2 | 4 | 0.584 | 1.000 |
| FOXP1 | 204 | 8 | 1 | 7 | 2 | 4 | 0.584 | 1.000 |
| ITGA2 | 204 | 8 | 1 | 7 | 2 | 4 | 0.584 | 1.000 |
| PLCG2 | 204 | 8 | 1 | 7 | 2 | 4 | 0.584 | 1.000 |
| BRAF | 204 | 8 | 1 | 7 | 2 | 4 | 0.584 | 1.000 |
| BRWD3 | 204 | 8 | 1 | 7 | 2 | 4 | 0.584 | 1.000 |
| PTEN | 204 | 8 | 1 | 7 | 2 | 4 | 0.584 | 1.000 |
| CHUK | 204 | 1 | 0 | 1 | 0 | 1 | 0.615 | 1.000 |
| CDKN2B | 204 | 1 | 0 | 1 | 0 | 1 | 0.615 | 1.000 |
| AKT1 | 204 | 1 | 0 | 1 | 0 | 1 | 0.615 | 1.000 |
| MALT1 | 204 | 1 | 0 | 1 | 0 | 1 | 0.615 | 1.000 |
| MLH3 | 204 | 1 | 0 | 1 | 0 | 1 | 0.615 | 1.000 |
| NGFR | 204 | 1 | 0 | 1 | 0 | 1 | 0.615 | 1.000 |
| IKZF2 | 204 | 1 | 0 | 1 | 0 | 1 | 0.615 | 1.000 |
| SPIB | 204 | 1 | 0 | 1 | 0 | 1 | 0.615 | 1.000 |
| NFKB2 | 204 | 1 | 0 | 1 | 0 | 1 | 0.615 | 1.000 |
| MAPK1 | 204 | 1 | 0 | 1 | 0 | 1 | 0.615 | 1.000 |
| XRCC6 | 204 | 1 | 0 | 1 | 0 | 1 | 0.615 | 1.000 |
| NFKB1 | 204 | 1 | 0 | 1 | 0 | 1 | 0.615 | 1.000 |
| IRF4 | 204 | 13 | 2 | 11 | 5 | 7 | 0.661 | 1.000 |
| TMEM30A | 204 | 13 | 2 | 11 | 5 | 7 | 0.661 | 1.000 |
| STAT6 | 204 | 7 | 1 | 6 | 2 | 4 | 0.696 | 1.000 |
| SETD2 | 204 | 7 | 1 | 6 | 2 | 4 | 0.696 | 1.000 |
| HIST1H2AM | 204 | 18 | 3 | 15 | 7 | 9 | 0.704 | 1.000 |
| BCR | 204 | 12 | 2 | 10 | 5 | 6 | 0.760 | 1.000 |
| PRKCB | 204 | 12 | 2 | 10 | 5 | 6 | 0.760 | 1.000 |
| BAX | 204 | 4 | 1 | 3 | 2 | 2 | 0.805 | 1.000 |
| VPS39 | 204 | 4 | 1 | 3 | 2 | 2 | 0.805 | 1.000 |
| IKBKB | 204 | 4 | 1 | 3 | 2 | 2 | 0.805 | 1.000 |
| TAGAP | 204 | 4 | 1 | 3 | 2 | 2 | 0.805 | 1.000 |
| TLR2 | 204 | 4 | 1 | 3 | 2 | 2 | 0.805 | 1.000 |
| IKBKE | 204 | 4 | 1 | 3 | 2 | 2 | 0.805 | 1.000 |
| CHD3 | 204 | 6 | 1 | 5 | 2 | 3 | 0.831 | 1.000 |
| ETV1 | 204 | 6 | 1 | 5 | 2 | 3 | 0.831 | 1.000 |
| HIST1H2AC | 204 | 6 | 1 | 5 | 2 | 3 | 0.831 | 1.000 |
| RHOA | 204 | 6 | 1 | 5 | 2 | 3 | 0.831 | 1.000 |
| EIF4A2 | 204 | 6 | 1 | 5 | 2 | 3 | 0.831 | 1.000 |
| IRF8 | 204 | 11 | 2 | 9 | 5 | 6 | 0.870 | 1.000 |
| MTOR | 204 | 11 | 2 | 9 | 5 | 6 | 0.870 | 1.000 |
| MCL1 | 204 | 11 | 2 | 9 | 5 | 6 | 0.870 | 1.000 |
| TET2 | 204 | 14 | 3 | 11 | 7 | 7 | 0.898 | 1.000 |
| MYC | 204 | 14 | 3 | 11 | 7 | 7 | 0.898 | 1.000 |
| TBL1XR1 | 204 | 24 | 5 | 19 | 12 | 12 | 0.924 | 1.000 |
| DUSP2 | 204 | 24 | 5 | 19 | 12 | 12 | 0.924 | 1.000 |
| MYD88 | 204 | 30 | 6 | 24 | 15 | 15 | 0.988 | 1.000 |
| NOTCH2 | 204 | 25 | 5 | 20 | 12 | 12 | 0.990 | 1.000 |
| MPEG1 | 204 | 20 | 4 | 16 | 10 | 10 | 0.991 | 1.000 |
| VMP1 | 204 | 10 | 2 | 8 | 5 | 5 | 0.994 | 1.000 |
| MSH6 | 204 | 10 | 2 | 8 | 5 | 5 | 0.994 | 1.000 |
| MAP3K4 | 204 | 10 | 2 | 8 | 5 | 5 | 0.994 | 1.000 |
| KLF4 | 204 | 5 | 1 | 4 | 2 | 2 | 0.996 | 1.000 |
| POLR3A | 204 | 5 | 1 | 4 | 2 | 2 | 0.996 | 1.000 |
| PRKCE | 204 | 5 | 1 | 4 | 2 | 2 | 0.996 | 1.000 |
| IKZF1 | 204 | 5 | 1 | 4 | 2 | 2 | 0.996 | 1.000 |

TABLE 9
Genes differentially expressed between
HBsAg+ DLBCLs and HBsAg− DLBCLs

| | Down/up regulated in |
|---|---|
| Gene | HBsAg+ DLBCL |
| AACS | down |
| ABHD14A | down |
| ACP1 | down |
| ADGRE1 | up |
| AKAP2 | up |
| ALG3 | down |
| ALG9 | down |
| ALKBH3 | down |
| AMN | down |
| ANKRD24 | up |
| AOC2 | down |
| AP1S1 | down |
| ARFIP2 | down |
| ARMCX5 | down |
| ATP13A1 | down |
| ATP9B | down |
| AXL | up |
| B9D1 | down |
| BCL2L1 | up |
| BORCS6 | up |
| C12orf49 | up |
| C14orf169 | up |
| C19orf35 | up |
| C2orf76 | up |
| C7orf13 | down |
| C8orf88 | down |
| C9orf72 | up |
| CALM3 | up |
| CALML4 | up |
| CCBL1 | down |
| CCDC25 | down |
| CCDC50 | down |
| CD24 | down |
| CD320 | down |
| CERK | up |
| CHCHD2 | down |
| CHP1 | up |
| CIITA | up |
| COX10 | up |
| COX11 | down |
| CPT1A | up |
| CRB3 | down |
| CTAGE7P | down |
| CX3CR1 | up |
| CYP2R1 | down |
| DALRD3 | down |
| DDX11-AS1 | down |
| DESI1 | up |
| DHX32 | down |
| DNHD1 | down |
| DPM2 | down |
| ECI2 | up |
| EFCAB12 | down |
| EFHC1 | down |
| EGLN1 | up |
| EGLN2 | up |
| EHHADH | down |
| EIF1 | up |
| EIF2B5 | down |
| EIF5A2 | up |
| EML2-AS1 | down |
| FAM102B | up |
| FAM110A | up |
| FAM129A | up |
| FAM221A | down |
| FAM95C | down |
| FBXW9 | down |
| FFAR1 | down |
| FJX1 | down |
| FOXD1 | up |
| GALNT14 | down |
| GALNT6 | down |
| GDPGP1 | up |
| GFOD1 | up |
| GHDC | down |
| GLYCTK | down |
| GNPNAT1 | down |
| HDHD3 | down |
| HEMK1 | down |
| HIST2H2BC | down |
| HLA-DPB1 | up |
| HLA-DRA | up |
| HLA-DRB5 | up |
| HLA-L | up |
| HOXC9 | up |
| HRSP12 | down |
| HS3ST1 | down |
| ICAM3 | down |
| IFRD2 | down |
| IFT81 | down |
| IL12RB2 | up |
| INTS9 | down |
| ITPR3 | down |
| ITPRIPL2 | up |
| IVD | up |
| KDM1B | up |
| KIF26B | up |
| WT2E-AS1 | down |
| LETMD1 | down |
| LGALS2 | up |
| LINC00115 | down |
| LINC00266-1 | down |
| LINC01137 | up |
| LINC01554 | down |
| LOC100288846 | down |
| LOC143666 | down |
| LOC644656 | down |
| MACC1 | down |
| MAML3 | up |
| MAPK1IP1L | up |
| MCCC1 | down |
| MDM2 | up |
| MED22 | down |
| MEST | down |
| MFSD14C | down |
| MIIP | up |
| MORN1 | down |
| MPLKIP | down |
| MRPL43 | up |
| MRPL45P2 | down |
| MRPS24 | down |
| MRPS25 | down |
| MRRF | down |
| MSMP | down |
| MUT | down |
| NAT9 | down |
| NCALD | up |
| NDUFA4 | down |
| NDUFB2 | down |
| NF2 | up |
| NMRAL1 | down |
| NPW | down |
| NSUN5P1 | down |
| NT5C3A | down |
| NUDT4 | up |
| OCRL | down |
| OTUD1 | up |
| P2RY11 | up |
| PADI2 | up |
| PAIP2B | down |
| PAN2 | down |
| PAPOLG | up |
| PAQR8 | up |
| PARD6G | down |
| PASK | up |
| PAXIP1-AS1 | down |
| PCSK1N | down |
| PEG10 | down |
| PER3 | up |
| PGBD5 | up |
| PIGV | down |
| PIK3CD | up |
| PLEKHB2 | up |
| PNMA2 | up |
| POLR2J3 | down |
| POLR3F | up |
| POU3F1 | up |
| PPP2R5A | up |
| PRNP | up |
| PRORSD1P | down |
| PSMF1 | up |
| PTGIR | up |
| PUS10 | up |
| RAB22A | up |
| RAB4B | up |
| RABGAP1L | up |
| RAP2B | up |
| RASA4 | down |
| RASSF1 | down |
| RBFA | down |
| RDH5 | down |
| RFK | up |
| RGMB | down |
| RHOG | up |
| RIMBP3 | up |
| RIPK1 | up |
| RNASEH1-AS1 | down |
| RNF103 | up |
| RNF115 | up |
| RNF14 | up |
| RPL26L1 | down |
| RPS14P3 | down |
| RPSA | down |
| SCIMP | up |
| SDCCAG3 | down |
| SDF2L1 | up |
| SELP | up |
| SEA1A4G | down |
| SERPINA3 | down |
| SGK1 | up |
| SH3GLB2 | down |
| SH3T1 | up |
| SLA | down |
| SLAMF1 | up |
| SLC9A1 | down |
| SLC25A34 | up |
| SLC25A38 | down |
| SLCO5A1 | up |
| SNAP23 | up |
| SNHG10 | down |
| SNHG7 | down |
| SNX5 | up |
| SOWAHD | up |
| SPATA24 | down |
| SPICE1 | down |
| SRP14-AS1 | down |
| STOML2 | down |
| STXBP3 | up |
| STYX | up |
| SVIP | down |
| SYT17 | up |
| TAF4 | up |
| TCF7 | up |
| TCTN3 | down |
| TECR | down |
| THEMIS2 | up |
| THOC5 | up |
| THOC7 | down |
| TLCD1 | down |
| TMEM116 | down |
| TMEM147-AS1 | down |
| TMEM14A | down |
| TMEM159 | down |
| TMEM186 | down |
| TMEM234 | down |
| TMUB1 | down |
| TP63 | up |
| TPMT | up |
| TRIM16L | down |
| TRIM26 | up |
| TXNL4A | down |
| UBLCP1 | up |
| UCHL3 | down |
| URB1-AS1 | down |
| UROS | up |
| WASF1 | down |
| WDR35 | down |
| WFDC2 | down |
| VPS18 | up |
| VPS33A | up |
| ZCCHC10 | up |
| ZNF512B | down |
| ZNF516 | down |
| ZNF518B | up |
| ZNF550 | down |
| ZNF557 | up |
| ZNF582-AS1 | down |
| ZNF672 | up |
| ZNF783 | down |
| ZSCAN18 | down |

p < 0.05 was included

TABLE 10

| GSEA to compare the gene expression profiles | | | | | | | | |
|---|---|---|---|---|---|---|---|---|
| in HBsAg+ DLBCLs and HBsAg− DLBCLs | | | | | | | | |
| | | | | NOM | FDR | RANK AT | LEADING | |
| KEGG Pathway | SIZE | ES | NES | p-val | q-val | MAX | EDGE | |
| Antigen_process- | 59 | 0.553 | 2.159 | 0.000 | 0.001 | 3444 | tags = | 53%, |
| ing_and_presen- | | | | | | | list = | 25%, |
| tation | | | | | | | signal = | 70% |
| Starch_and_su- | 20 | 0.694 | 2.116 | 0.000 | 0.018 | 2513 | tags = | 55%, |
| crose_metabolism | | | | | | | list = | 18%, |
| | | | | | | | signal = | 67% |
| Amyotrophic_lat- | 36 | 0.518 | 1.919 | 0.000 | 0.088 | 3659 | tags = | 47%, |
| eral_sclerosis_als | | | | | | | list = | 27%, |
| | | | | | | | signal = | 64% |
| Type_i_dia- | 35 | 0.655 | 1.832 | 0.000 | 0.105 | 2139 | tags = | 54%, |
| betes_mellitus | | | | | | | list = | 16%, |
| | | | | | | | signal = | 64% |
| Graft_ver- | 31 | 0.644 | 1.846 | 0.000 | 0.111 | 2139 | tags = | 55%, |
| sus_host_disease | | | | | | | list = | 16%, |
| | | | | | | | signal = | 65% |
| Autoimmune_ | 30 | 0.646 | 1.776 | 0.019 | 0.126 | 2139 | tags = | 57%, |
| thyroid_disease | | | | | | | list = | 16%, |
| | | | | | | | signal = | 67% |
| Viral_myocarditis | 55 | 0.528 | 1.795 | 0.000 | 0.138 | 2933 | tags = | 47%, |
| | | | | | | | list = | 21%, |
| | | | | | | | signal = | 60% |
| Pentose_phos- | 21 | 0.545 | 1.739 | 0.000 | 0.148 | 2429 | tags = | 33%, |
| phate_pathway | | | | | | | list = | 18%, |
| | | | | | | | signal = | 40% |
| Allograft_re- | 32 | 0.622 | 1.702 | 0.021 | 0.154 | 2139 | tags = | 53%, |
| jection | | | | | | | list = | 16%, |
| | | | | | | | signal = | 63% |
| Thyroid_cancer | 25 | 0.517 | 1.683 | 0.019 | 0.158 | 181 | tags = | 16%, |
| | | | | | | | list = | 1%, |
| | | | | | | | signal = | 16% |
| p53_signal- | 61 | 0.469 | 1.667 | 0.000 | 0.167 | 3461 | tags = | 41%, |
| ing_pathway | | | | | | | list = | 25%, |
| | | | | | | | signal = | 55% |
| Leishmania_in- | 65 | 0.501 | 1.644 | 0.020 | 0.177 | 3300 | tags = | 45%, |
| fection | | | | | | | list = | 24%, |
| | | | | | | | signal = | 58% |

TABLE 11

| Comparison of mutation targets in DLBCLs | | | | | | | | | | | | | | |
|---|---|---|---|---|---|---|---|---|---|---|---|---|---|---|
| derived from Chiese and Western cohorts | | | | | | | | | | | | | | |
| | | | | | | | Com- | | | | | | | |
| | | | | Western cohorts | | | parison | | | | | | | |
| | | | | from 6 | | | Chinese | | | | | | | |
| | Current study | | | references* | | | vs | HBsAg+ and HBsAg− DLBCL in Current study | | | | | | |
| | | Chi- | | | Oth- | | Western | HB | HBs | HB | HB | HBs | HB | HBsAg+ |
| | Chi- | nese | Chi- | Oth- | ers_ | Oth- | co- | sAg | Ag+_ | sA | sAg | Ag−_ | sA | vs |
| | nese_ | To- | nese_ | ers_ | To- | ers_ | hort_P | +_ | To- | g+_ | −_ | To- | g−_ | HBsAg−_ |
| Gene | Mut | tal | % | Mut | tal | % | value | Mut | tal | % | Mut | tal | % | P value |
| KLF2 | 33 | 204 | 16.2% | 1 | 187 | 0.5% | 0 | 13 | 41 | 31.7% | 20 | 163 | 12.3% | 0.0025 |
| TMSB4X | 33 | 204 | 16.2% | 0 | 102 | 0.0% | 0 | 12 | 41 | 29.3% | 21 | 163 | 12.9% | 0.0109 |
| BTG2 | 44 | 204 | 21.6% | 1 | 102 | 1.0% | 0 | 12 | 41 | 29.3% | 32 | 163 | 19.6% | 0.1799 |
| DTX1 | 37 | 204 | 18.1% | 5 | 159 | 3.1% | 0 | 9 | 41 | 22.0% | 28 | 163 | 17.2% | 0.4783 |
| SOCS1 | 32 | 204 | 15.7% | 5 | 159 | 3.1% | 0.0001 | 10 | 41 | 24.4% | 22 | 163 | 13.5% | 0.0864 |
| APOB | 26 | 204 | 12.8% | 1 | 102 | 1.0% | 0.0002 | 4 | 41 | 9.8% | 22 | 163 | 13.5% | 0.6109 |
| NOTCH2 | 25 | 204 | 12.3% | 5 | 159 | 3.1% | 0.0018 | 5 | 41 | 12.2% | 20 | 163 | 12.3% | 0.9896 |
| MLL3 | 31 | 204 | 15.2% | 8 | 159 | 5.0% | 0.0019 | 7 | 41 | 17.1% | 24 | 163 | 14.7% | 0.708 |
| ITPKB | 36 | 204 | 17.7% | 5 | 102 | 4.9% | 0.002 | 8 | 41 | 19.5% | 28 | 163 | 17.2% | 0.726 |
| CCND3 | 19 | 204 | 9.3% | 4 | 187 | 2.1% | 0.0024 | 2 | 41 | 4.9% | 17 | 163 | 10.4% | 0.3757 |
| LRP5 | 10 | 204 | 4.9% | 0 | 159 | 0.0% | 0.0031 | 1 | 41 | 2.4% | 9 | 163 | 5.5% | 0.6904 |
| HIST1H1E | 35 | 204 | 17.2% | 11 | 159 | 6.9% | 0.0036 | 6 | 41 | 14.6% | 29 | 163 | 17.8% | 0.6317 |
| BCL7A | 13 | 204 | 6.4% | 1 | 159 | 0.6% | 0.0046 | 0 | 41 | 0.0% | 13 | 163 | 8.0% | 0.0752 |
| EZH2 | 7 | 204 | 3.4% | 17 | 159 | 10.7% | 0.0057 | 0 | 41 | 0.0% | 7 | 163 | 4.3% | 0.3487 |
| DDX3X | 13 | 204 | 6.4% | 0 | 102 | 0.0% | 0.0058 | 3 | 41 | 7.3% | 10 | 163 | 6.1% | 0.7274 |
| BCL6 | 28 | 204 | 13.7% | 8 | 159 | 5.0% | 0.006 | 13 | 41 | 31.7% | 15 | 163 | 9.2% | 0.0002 |
| BCL2 | 12 | 204 | 5.9% | 26 | 187 | 13.9% | 0.0075 | 1 | 41 | 2.4% | 11 | 163 | 6.8% | 0.4661 |
| PRDM1 | 19 | 204 | 9.3% | 5 | 165 | 3.0% | 0.0149 | 3 | 41 | 7.3% | 16 | 163 | 9.8% | 0.7704 |
| LIFR | 13 | 204 | 6.4% | 2 | 159 | 1.3% | 0.0161 | 3 | 41 | 7.3% | 10 | 163 | 6.1% | 0.7274 |
| WHSC1 | 13 | 204 | 6.4% | 2 | 159 | 1.3% | 0.0161 | 4 | 41 | 9.8% | 9 | 163 | 5.5% | 0.2999 |
| EIF4G1 | 11 | 204 | 5.4% | 0 | 102 | 0.0% | 0.0183 | 3 | 41 | 7.3% | 8 | 163 | 4.9% | 0.4649 |
| MCL1 | 11 | 204 | 5.4% | 0 | 102 | 0.0% | 0.0183 | 2 | 41 | 4.9% | 9 | 163 | 5.5% | 1 |
| TNFAIP3 | 24 | 204 | 11.8% | 8 | 165 | 4.9% | 0.0189 | 6 | 41 | 14.6% | 18 | 163 | 11.0% | 0.5235 |
| FAS | 25 | 204 | 12.3% | 4 | 102 | 3.9% | 0.0217 | 11 | 41 | 26.8% | 14 | 163 | 8.6% | 0.0015 |
| PIM1 | 55 | 204 | 27.0% | 27 | 159 | 17.0% | 0.0241 | 12 | 41 | 29.3% | 43 | 163 | 26.4% | 0.7095 |
| FOXO1 | 12 | 204 | 5.9% | 2 | 153 | 1.3% | 0.0291 | 4 | 41 | 9.8% | 8 | 163 | 4.9% | 0.2648 |
| CDKN2A | 9 | 204 | 4.4% | 0 | 102 | 0.0% | 0.032 | 1 | 41 | 2.4% | 8 | 163 | 4.9% | 0.6904 |
| CSK | 9 | 204 | 4.4% | 0 | 102 | 0.0% | 0.032 | 3 | 41 | 7.3% | 6 | 163 | 3.7% | 0.3885 |
| GPR37 | 9 | 204 | 4.4% | 0 | 102 | 0.0% | 0.032 | 1 | 41 | 2.4% | 8 | 163 | 4.9% | 0.6904 |
| DUSP2 | 24 | 204 | 11.8% | 4 | 102 | 3.9% | 0.0336 | 5 | 41 | 12.2% | 19 | 163 | 11.7% | 0.9238 |
| MSL2 | 10 | 204 | 4.9% | 0 | 102 | 0.0% | 0.0341 | 5 | 41 | 12.2% | 5 | 163 | 3.1% | 0.0155 |
| VMP1 | 10 | 204 | 4.9% | 0 | 102 | 0.0% | 0.0341 | 2 | 41 | 4.9% | 8 | 163 | 4.9% | 1 |
| MPEG1 | 20 | 204 | 9.8% | 3 | 102 | 2.9% | 0.0374 | 4 | 41 | 9.8% | 16 | 163 | 9.8% | 1 |
| MSH2 | 13 | 204 | 6.4% | 1 | 102 | 1.0% | 0.0402 | 1 | 41 | 2.4% | 12 | 163 | 7.4% | 0.4726 |
| ATM | 16 | 204 | 7.8% | 2 | 102 | 2.0% | 0.041 | 4 | 41 | 9.8% | 12 | 163 | 7.4% | 0.534 |
| NFKBIE | 17 | 204 | 8.3% | 2 | 102 | 2.0% | 0.0414 | 7 | 41 | 17.1% | 10 | 163 | 6.1% | 0.0235 |
| MTOR | 11 | 204 | 5.4% | 2 | 159 | 1.3% | 0.0452 | 2 | 41 | 4.9% | 9 | 163 | 5.5% | 1 |
| JAG1 | 2 | 204 | 1.0% | 7 | 159 | 4.4% | 0.0459 | 0 | 41 | 0.0% | 2 | 163 | 1.2% | 1 |
| B2M | 28 | 204 | 13.7% | 12 | 165 | 7.3% | 0.0474 | 2 | 41 | 4.9% | 26 | 163 | 16.0% | 0.0768 |
| NOTCH1 | 22 | 204 | 10.8% | 4 | 102 | 3.9% | 0.0499 | 6 | 41 | 14.6% | 16 | 163 | 9.8% | 0.374 |
| TBL1XR1 | 24 | 204 | 11.8% | 5 | 102 | 4.9% | 0.0533 | 5 | 41 | 12.2% | 19 | 163 | 11.7% | 0.9238 |
| ARID1A | 18 | 204 | 8.8% | 6 | 159 | 3.8% | 0.0547 | 5 | 41 | 12.2% | 13 | 163 | 8.0% | 0.3945 |
| LYN | 8 | 204 | 3.9% | 0 | 102 | 0.0% | 0.0556 | 3 | 41 | 7.3% | 5 | 163 | 3.1% | 0.2019 |
| ETV6 | 18 | 204 | 8.8% | 3 | 102 | 2.9% | 0.0584 | 4 | 41 | 9.8% | 14 | 163 | 8.6% | 0.7634 |
| FLT1 | 11 | 204 | 5.4% | 1 | 102 | 1.0% | 0.0675 | 3 | 41 | 7.3% | 8 | 163 | 4.9% | 0.4649 |
| CD70 | 31 | 204 | 15.2% | 8 | 102 | 7.8% | 0.069 | 13 | 41 | 31.7% | 18 | 163 | 11.0% | 0.001 |
| CD79A | 5 | 204 | 2.5% | 0 | 159 | 0.0% | 0.0704 | 0 | 41 | 0.0% | 5 | 163 | 3.1% | 0.5853 |
| GNA13 | 15 | 204 | 7.4% | 24 | 187 | 12.8% | 0.0708 | 2 | 41 | 4.9% | 13 | 163 | 8.0% | 0.7402 |
| ZFP36L1 | 20 | 204 | 9.8% | 4 | 102 | 3.9% | 0.0757 | 8 | 41 | 19.5% | 12 | 163 | 7.4% | 0.0194 |
| TET2 | 14 | 204 | 6.9% | 2 | 102 | 2.0% | 0.1001 | 3 | 41 | 7.3% | 11 | 163 | 6.8% | 1 |
| TP73 | 10 | 204 | 4.9% | 1 | 102 | 1.0% | 0.1074 | 4 | 41 | 9.8% | 6 | 163 | 3.7% | 0.1173 |
| MALT1 | 1 | 204 | 0.5% | 3 | 102 | 2.9% | 0.1096 | 0 | 41 | 0.0% | 1 | 163 | 0.6% | 1 |
| ROBO2 | 19 | 204 | 9.3% | 4 | 102 | 3.9% | 0.1097 | 2 | 41 | 4.9% | 17 | 163 | 10.4% | 0.3757 |
| MYC | 14 | 204 | 6.9% | 5 | 159 | 3.1% | 0.1145 | 3 | 41 | 7.3% | 11 | 163 | 6.8% | 1 |
| S1PR2 | 5 | 204 | 2.5% | 6 | 102 | 5.9% | 0.1285 | 0 | 41 | 0.0% | 5 | 163 | 3.1% | 0.5853 |
| MEF2B | 11 | 204 | 5.4% | 15 | 159 | 9.4% | 0.1384 | 2 | 41 | 4.9% | 9 | 163 | 5.5% | 1 |
| RHOA | 6 | 204 | 2.9% | 1 | 159 | 0.6% | 0.1416 | 1 | 41 | 2.4% | 5 | 163 | 3.1% | 1 |
| HIST1H1C | 16 | 204 | 7.8% | 19 | 153 | 12.4% | 0.1503 | 4 | 41 | 9.8% | 12 | 163 | 7.4% | 0.534 |
| CXCR4 | 12 | 204 | 5.9% | 2 | 102 | 2.0% | 0.1533 | 6 | 41 | 14.6% | 6 | 163 | 3.7% | 0.0077 |
| CREBBP | 21 | 204 | 10.3% | 29 | 193 | 15.0% | 0.1555 | 2 | 41 | 4.9% | 19 | 163 | 11.7% | 0.2601 |
| EHD1 | 13 | 204 | 6.4% | 2 | 102 | 2.0% | 0.1571 | 5 | 41 | 12.2% | 8 | 163 | 4.9% | 0.0877 |
| IRF4 | 13 | 204 | 6.4% | 2 | 102 | 2.0% | 0.1571 | 2 | 41 | 4.9% | 11 | 163 | 6.8% | 1 |
| HIST1H2AM | 18 | 204 | 8.8% | 4 | 102 | 3.9% | 0.1591 | 3 | 41 | 7.3% | 15 | 163 | 9.2% | 1 |
| TP63 | 9 | 204 | 4.4% | 1 | 102 | 1.0% | 0.1734 | 4 | 41 | 9.8% | 5 | 163 | 3.1% | 0.0823 |
| IKZF1 | 5 | 204 | 2.5% | 0 | 102 | 0.0% | 0.1734 | 1 | 41 | 2.4% | 4 | 163 | 2.5% | 1 |
| PIK3CB | 5 | 204 | 2.5% | 0 | 102 | 0.0% | 0.1734 | 0 | 41 | 0.0% | 5 | 163 | 3.1% | 0.5853 |
| POLR3A | 5 | 204 | 2.5% | 0 | 102 | 0.0% | 0.1734 | 1 | 41 | 2.4% | 4 | 163 | 2.5% | 1 |
| PRKCE | 5 | 204 | 2.5% | 0 | 102 | 0.0% | 0.1734 | 1 | 41 | 2.4% | 4 | 163 | 2.5% | 1 |
| JUNB | 9 | 204 | 4.4% | 1 | 102 | 1.0% | 0.1734 | 1 | 41 | 2.4% | 8 | 163 | 4.9% | 0.6904 |
| TCF3 | 9 | 204 | 4.4% | 1 | 102 | 1.0% | 0.1734 | 3 | 41 | 7.3% | 6 | 163 | 3.7% | 0.3885 |
| EBF1 | 19 | 204 | 9.3% | 5 | 102 | 4.9% | 0.176 | 7 | 41 | 17.1% | 12 | 163 | 7.4% | 0.0558 |
| CD36 | 10 | 204 | 4.9% | 4 | 187 | 2.1% | 0.1775 | 1 | 41 | 2.4% | 9 | 163 | 5.5% | 0.6904 |
| CHEK2 | 6 | 204 | 2.9% | 0 | 102 | 0.0% | 0.1836 | 4 | 41 | 9.8% | 2 | 163 | 1.2% | 0.0157 |
| CHRM3 | 6 | 204 | 2.9% | 0 | 102 | 0.0% | 0.1836 | 3 | 41 | 7.3% | 3 | 163 | 1.8% | 0.097 |
| ETV1 | 6 | 204 | 2.9% | 0 | 102 | 0.0% | 0.1836 | 1 | 41 | 2.4% | 5 | 163 | 3.1% | 1 |
| ID3 | 6 | 204 | 2.9% | 0 | 102 | 0.0% | 0.1836 | 2 | 41 | 4.9% | 4 | 163 | 2.5% | 0.3471 |
| ITGAV | 6 | 204 | 2.9% | 0 | 102 | 0.0% | 0.1836 | 0 | 41 | 0.0% | 6 | 163 | 3.7% | 0.6024 |
| LTBP2 | 6 | 204 | 2.9% | 0 | 102 | 0.0% | 0.1836 | 0 | 41 | 0.0% | 6 | 163 | 3.7% | 0.6024 |
| PARP1 | 6 | 204 | 2.9% | 0 | 102 | 0.0% | 0.1836 | 2 | 41 | 4.9% | 4 | 163 | 2.5% | 0.3471 |
| FANCD2 | 8 | 204 | 3.9% | 2 | 159 | 1.3% | 0.196 | 2 | 41 | 4.9% | 6 | 163 | 3.7% | 0.6629 |
| ITGA2 | 8 | 204 | 3.9% | 2 | 159 | 1.3% | 0.196 | 1 | 41 | 2.4% | 7 | 163 | 4.3% | 1 |
| BTG1 | 32 | 204 | 15.7% | 21 | 187 | 11.2% | 0.1985 | 5 | 41 | 12.2% | 27 | 163 | 16.6% | 0.4917 |
| HIST1H2AC | 6 | 204 | 2.9% | 6 | 102 | 5.9% | 0.2115 | 1 | 41 | 2.4% | 5 | 163 | 3.1% | 1 |
| UBE2A | 16 | 204 | 7.8% | 4 | 108 | 3.7% | 0.2242 | 9 | 41 | 22.0% | 7 | 163 | 4.3% | 0.0002 |
| KLF4 | 5 | 204 | 2.5% | 1 | 159 | 0.6% | 0.2365 | 1 | 41 | 2.4% | 4 | 163 | 2.5% | 1 |
| TP53 | 42 | 204 | 20.6% | 30 | 187 | 16.0% | 0.2467 | 7 | 41 | 17.1% | 35 | 163 | 21.5% | 0.5335 |
| SGK1 | 30 | 204 | 14.7% | 17 | 159 | 10.7% | 0.2584 | 10 | 41 | 24.4% | 20 | 163 | 12.3% | 0.0501 |
| NFKB2 | 1 | 204 | 0.5% | 2 | 102 | 2.0% | 0.2585 | 0 | 41 | 0.0% | 1 | 163 | 0.6% | 1 |
| SPIB | 1 | 204 | 0.5% | 2 | 102 | 2.0% | 0.2585 | 0 | 41 | 0.0% | 1 | 163 | 0.6% | 1 |
| ROBO1 | 17 | 204 | 8.3% | 5 | 102 | 4.9% | 0.2733 | 1 | 41 | 2.4% | 16 | 163 | 9.8% | 0.2042 |
| EEF1A1 | 7 | 204 | 3.4% | 1 | 102 | 1.0% | 0.2766 | 2 | 41 | 4.9% | 5 | 163 | 3.1% | 0.6299 |
| PAX5 | 7 | 204 | 3.4% | 1 | 102 | 1.0% | 0.2766 | 2 | 41 | 4.9% | 5 | 163 | 3.1% | 0.6299 |
| RRAGC | 8 | 204 | 3.9% | 1 | 102 | 1.0% | 0.2806 | 5 | 41 | 12.2% | 3 | 163 | 1.8% | 0.0092 |
| PLCG2 | 8 | 204 | 3.9% | 1 | 102 | 1.0% | 0.2806 | 1 | 41 | 2.4% | 7 | 163 | 4.3% | 1 |
| PRKCD | 8 | 204 | 3.9% | 1 | 102 | 1.0% | 0.2806 | 3 | 41 | 7.3% | 5 | 163 | 3.1% | 0.2019 |
| PTEN | 8 | 204 | 3.9% | 1 | 102 | 1.0% | 0.2806 | 1 | 41 | 2.4% | 7 | 163 | 4.3% | 1 |
| SMARCC2 | 8 | 204 | 3.9% | 1 | 102 | 1.0% | 0.2806 | 2 | 41 | 4.9% | 6 | 163 | 3.7% | 0.6629 |
| BLM | 10 | 204 | 4.9% | 4 | 159 | 2.5% | 0.2831 | 3 | 41 | 7.3% | 7 | 163 | 4.3% | 0.4238 |
| CDKN1B | 4 | 204 | 2.0% | 0 | 102 | 0.0% | 0.3052 | 3 | 41 | 7.3% | 1 | 163 | 0.6% | 0.0262 |
| EXO1 | 4 | 204 | 2.0% | 0 | 102 | 0.0% | 0.3052 | 2 | 41 | 4.9% | 2 | 163 | 1.2% | 0.1808 |
| VPS39 | 4 | 204 | 2.0% | 0 | 102 | 0.0% | 0.3052 | 1 | 41 | 2.4% | 3 | 163 | 1.8% | 1 |
| ETS1 | 15 | 204 | 7.4% | 4 | 102 | 3.9% | 0.3184 | 4 | 41 | 9.8% | 11 | 163 | 6.8% | 0.5081 |
| DDB1 | 1 | 204 | 0.5% | 3 | 159 | 1.9% | 0.3229 | 1 | 41 | 2.4% | 0 | 163 | 0.0% | 0.201 |
| CD79B | 30 | 204 | 14.7% | 22 | 193 | 11.4% | 0.329 | 3 | 41 | 7.3% | 27 | 163 | 16.6% | 0.2151 |
| CARD11 | 23 | 204 | 11.3% | 28 | 193 | 14.5% | 0.3359 | 6 | 41 | 14.6% | 17 | 163 | 10.4% | 0.4467 |
| CD83 | 9 | 204 | 4.4% | 2 | 102 | 2.0% | 0.3473 | 3 | 41 | 7.3% | 6 | 163 | 3.7% | 0.3885 |
| MAP3K4 | 10 | 204 | 4.9% | 2 | 102 | 2.0% | 0.3491 | 2 | 41 | 4.9% | 8 | 163 | 4.9% | 1 |
| MSH6 | 10 | 204 | 4.9% | 2 | 102 | 2.0% | 0.3491 | 2 | 41 | 4.9% | 8 | 163 | 4.9% | 1 |
| ROR2 | 8 | 204 | 3.9% | 3 | 159 | 1.9% | 0.3599 | 0 | 41 | 0.0% | 8 | 163 | 4.9% | 0.3623 |
| NFKBIA | 6 | 204 | 2.9% | 5 | 102 | 4.9% | 0.3851 | 2 | 41 | 4.9% | 4 | 163 | 2.5% | 0.3471 |
| CD58 | 20 | 204 | 9.8% | 11 | 153 | 7.2% | 0.3853 | 6 | 41 | 14.6% | 14 | 163 | 8.6% | 0.2446 |
| APC | 13 | 204 | 6.4% | 7 | 159 | 4.4% | 0.4144 | 0 | 41 | 0.0% | 13 | 163 | 8.0% | 0.0752 |
| EIF4A2 | 6 | 204 | 2.9% | 1 | 102 | 1.0% | 0.4311 | 1 | 41 | 2.4% | 5 | 163 | 3.1% | 1 |
| FBXO11 | 4 | 204 | 2.0% | 4 | 102 | 3.9% | 0.4479 | 0 | 41 | 0.0% | 4 | 163 | 2.5% | 0.5853 |
| BCL10 | 10 | 204 | 4.9% | 7 | 102 | 6.9% | 0.4803 | 3 | 41 | 7.3% | 7 | 163 | 4.3% | 0.4238 |
| MKI67 | 8 | 204 | 3.9% | 2 | 102 | 2.0% | 0.5049 | 5 | 41 | 12.2% | 3 | 163 | 1.8% | 0.0092 |
| BRAF | 8 | 204 | 3.9% | 2 | 102 | 2.0% | 0.5049 | 1 | 41 | 2.4% | 7 | 163 | 4.3% | 1 |
| FOXP1 | 8 | 204 | 3.9% | 2 | 102 | 2.0% | 0.5049 | 1 | 41 | 2.4% | 7 | 163 | 4.3% | 1 |
| ARHGAP26 | 2 | 204 | 1.0% | 0 | 159 | 0.0% | 0.5063 | 1 | 41 | 2.4% | 1 | 163 | 0.6% | 0.3624 |
| TNFRSF14 | 27 | 204 | 13.2% | 24 | 153 | 15.7% | 0.5125 | 12 | 41 | 29.3% | 15 | 163 | 9.2% | 0.0007 |
| PIK3CD | 4 | 204 | 2.0% | 5 | 159 | 3.1% | 0.5128 | 0 | 41 | 0.0% | 4 | 163 | 2.5% | 0.5853 |
| EP300 | 7 | 204 | 3.4% | 5 | 102 | 4.9% | 0.5321 | 0 | 41 | 0.0% | 7 | 163 | 4.3% | 0.3487 |
| TRAF3 | 3 | 204 | 1.5% | 0 | 102 | 0.0% | 0.5534 | 3 | 41 | 7.3% | 0 | 163 | 0.0% | 0.0076 |
| APOBEC3B | 3 | 204 | 1.5% | 0 | 102 | 0.0% | 0.5534 | 0 | 41 | 0.0% | 3 | 163 | 1.8% | 1 |
| CXCL5 | 3 | 204 | 1.5% | 0 | 102 | 0.0% | 0.5534 | 1 | 41 | 2.4% | 2 | 163 | 1.2% | 0.4918 |
| DCLRE1C | 3 | 204 | 1.5% | 0 | 102 | 0.0% | 0.5534 | 1 | 41 | 2.4% | 2 | 163 | 1.2% | 0.4918 |
| DDX42 | 3 | 204 | 1.5% | 0 | 102 | 0.0% | 0.5534 | 0 | 41 | 0.0% | 3 | 163 | 1.8% | 1 |
| RFXANK | 3 | 204 | 1.5% | 0 | 102 | 0.0% | 0.5534 | 0 | 41 | 0.0% | 3 | 163 | 1.8% | 1 |
| SOCS5 | 3 | 204 | 1.5% | 0 | 102 | 0.0% | 0.5534 | 0 | 41 | 0.0% | 3 | 163 | 1.8% | 1 |
| TNFSF13B | 3 | 204 | 1.5% | 0 | 102 | 0.0% | 0.5534 | 2 | 41 | 4.9% | 1 | 163 | 0.6% | 0.1035 |
| XRCC5 | 3 | 204 | 1.5% | 0 | 102 | 0.0% | 0.5534 | 0 | 41 | 0.0% | 3 | 163 | 1.8% | 1 |
| AICDA | 2 | 204 | 1.0% | 0 | 102 | 0.0% | 0.5541 | 0 | 41 | 0.0% | 2 | 163 | 1.2% | 1 |
| CD28 | 2 | 204 | 1.0% | 0 | 102 | 0.0% | 0.5541 | 1 | 41 | 2.4% | 1 | 163 | 0.6% | 0.3624 |
| NFKBIZ | 2 | 204 | 1.0% | 0 | 102 | 0.0% | 0.5541 | 0 | 41 | 0.0% | 2 | 163 | 1.2% | 1 |
| PRPF4B | 2 | 204 | 1.0% | 0 | 102 | 0.0% | 0.5541 | 2 | 41 | 4.9% | 0 | 163 | 0.0% | 0.0396 |
| IKZF3 | 10 | 204 | 4.9% | 3 | 102 | 2.9% | 0.5549 | 5 | 41 | 12.2% | 5 | 163 | 3.1% | 0.0155 |
| ARID5B | 10 | 204 | 4.9% | 3 | 102 | 2.9% | 0.5549 | 1 | 41 | 2.4% | 9 | 163 | 5.5% | 0.6904 |
| NGFR | 1 | 204 | 0.5% | 2 | 159 | 1.3% | 0.5836 | 0 | 41 | 0.0% | 1 | 163 | 0.6% | 1 |
| PRKCB | 12 | 204 | 5.9% | 4 | 102 | 3.9% | 0.5916 | 2 | 41 | 4.9% | 10 | 163 | 6.1% | 1 |
| BTK | 2 | 204 | 1.0% | 2 | 102 | 2.0% | 0.603 | 0 | 41 | 0.0% | 2 | 163 | 1.2% | 1 |
| SYK | 2 | 204 | 1.0% | 2 | 102 | 2.0% | 0.603 | 0 | 41 | 0.0% | 2 | 163 | 1.2% | 1 |
| BRCA2 | 10 | 204 | 4.9% | 6 | 159 | 3.8% | 0.6033 | 2 | 41 | 4.9% | 8 | 163 | 4.9% | 1 |
| SETD2 | 7 | 204 | 3.4% | 7 | 159 | 4.4% | 0.6336 | 1 | 41 | 2.4% | 6 | 163 | 3.7% | 1 |
| CIITA | 16 | 204 | 7.8% | 10 | 153 | 6.5% | 0.6381 | 1 | 41 | 2.4% | 15 | 163 | 9.2% | 0.203 |
| ITGB3 | 2 | 204 | 1.0% | 3 | 159 | 1.9% | 0.6572 | 1 | 41 | 2.4% | 1 | 163 | 0.6% | 0.3624 |
| POU2F2 | 6 | 204 | 2.9% | 6 | 159 | 3.8% | 0.6599 | 0 | 41 | 0.0% | 6 | 163 | 3.7% | 0.6024 |
| KDM2B | 5 | 204 | 2.5% | 1 | 102 | 1.0% | 0.6675 | 0 | 41 | 0.0% | 5 | 163 | 3.1% | 0.5853 |
| S1PR2 | 5 | 204 | 2.5% | 1 | 102 | 1.0% | 0.6675 | 0 | 41 | 0.0% | 5 | 163 | 3.1% | 0.5853 |
| CDK14 | 4 | 204 | 2.0% | 1 | 102 | 1.0% | 0.6681 | 3 | 41 | 7.3% | 1 | 163 | 0.6% | 0.0262 |
| ERBB2 | 4 | 204 | 2.0% | 1 | 102 | 1.0% | 0.6681 | 3 | 41 | 7.3% | 1 | 163 | 0.6% | 0.0262 |
| BAX | 4 | 204 | 2.0% | 1 | 102 | 1.0% | 0.6681 | 1 | 41 | 2.4% | 3 | 163 | 1.8% | 1 |
| BRCA1 | 4 | 204 | 2.0% | 1 | 102 | 1.0% | 0.6681 | 2 | 41 | 4.9% | 2 | 163 | 1.2% | 0.1808 |
| PIK3CG | 4 | 204 | 2.0% | 1 | 102 | 1.0% | 0.6681 | 0 | 41 | 0.0% | 4 | 163 | 2.5% | 0.5853 |
| TAGAP | 4 | 204 | 2.0% | 1 | 102 | 1.0% | 0.6681 | 1 | 41 | 2.4% | 3 | 163 | 1.8% | 1 |
| TLR2 | 4 | 204 | 2.0% | 3 | 102 | 2.9% | 0.6897 | 1 | 41 | 2.4% | 3 | 163 | 1.8% | 1 |
| TMEM30A | 13 | 204 | 6.4% | 9 | 165 | 5.5% | 0.7112 | 2 | 41 | 4.9% | 11 | 163 | 6.8% | 1 |
| IRF8 | 11 | 204 | 5.4% | 10 | 159 | 6.3% | 0.7164 | 2 | 41 | 4.9% | 9 | 163 | 5.5% | 1 |
| KRAS | 7 | 204 | 3.4% | 2 | 102 | 2.0% | 0.7228 | 2 | 41 | 4.9% | 5 | 163 | 3.1% | 0.6299 |
| ARHGAP32 | 6 | 204 | 2.9% | 2 | 102 | 2.0% | 0.7232 | 2 | 41 | 4.9% | 4 | 163 | 2.5% | 0.3471 |
| MYD88 | 30 | 204 | 14.7% | 26 | 193 | 13.5% | 0.724 | 6 | 41 | 14.6% | 24 | 163 | 14.7% | 0.9884 |
| CHD3 | 6 | 204 | 2.9% | 3 | 159 | 1.9% | 0.7367 | 1 | 41 | 2.4% | 5 | 163 | 3.1% | 1 |
| PRKDC | 14 | 204 | 6.9% | 6 | 102 | 5.9% | 0.7436 | 5 | 41 | 12.2% | 9 | 163 | 5.5% | 0.1308 |
| MLL2 | 50 | 204 | 24.5% | 37 | 142 | 26.1% | 0.7443 | 8 | 41 | 19.5% | 42 | 163 | 25.8% | 0.4053 |
| DLC1 | 9 | 204 | 4.4% | 3 | 102 | 2.9% | 0.7567 | 0 | 41 | 0.0% | 9 | 163 | 5.5% | 0.2091 |
| GNAI2 | 8 | 204 | 3.9% | 3 | 102 | 2.9% | 0.7572 | 1 | 41 | 2.4% | 7 | 163 | 4.3% | 1 |
| KLHL6 | 16 | 204 | 7.8% | 9 | 102 | 8.8% | 0.7679 | 5 | 41 | 12.2% | 11 | 163 | 6.8% | 0.2462 |
| STAT3 | 18 | 204 | 8.8% | 8 | 102 | 7.8% | 0.7719 | 7 | 41 | 17.1% | 11 | 163 | 6.8% | 0.0372 |
| TAF1 | 9 | 204 | 4.4% | 5 | 102 | 4.9% | 0.8466 | 1 | 41 | 2.4% | 8 | 163 | 4.9% | 0.6904 |
| RFTN1 | 11 | 204 | 5.4% | 5 | 102 | 4.9% | 0.8559 | 1 | 41 | 2.4% | 10 | 163 | 6.1% | 0.6977 |
| BCL11A | 5 | 204 | 2.5% | 2 | 102 | 2.0% | 1 | 3 | 41 | 7.3% | 2 | 163 | 1.2% | 0.0564 |
| SCYL1 | 5 | 204 | 2.5% | 3 | 159 | 1.9% | 1 | 0 | 41 | 0.0% | 5 | 163 | 3.1% | 0.5853 |
| STAT6 | 7 | 204 | 3.4% | 3 | 102 | 2.9% | 1 | 1 | 41 | 2.4% | 6 | 163 | 3.7% | 1 |
| ATRX | 8 | 204 | 3.9% | 4 | 102 | 3.9% | 1 | 2 | 41 | 4.9% | 6 | 163 | 3.7% | 0.6629 |
| BCR | 12 | 204 | 5.9% | 6 | 102 | 5.9% | 1 | 2 | 41 | 4.9% | 10 | 163 | 6.1% | 1 |
| BRWD3 | 8 | 204 | 3.9% | 4 | 102 | 3.9% | 1 | 1 | 41 | 2.4% | 7 | 163 | 4.3% | 1 |
| JAK2 | 3 | 204 | 1.5% | 1 | 102 | 1.0% | 1 | 2 | 41 | 4.9% | 1 | 163 | 0.6% | 0.1035 |
| MLH1 | 3 | 204 | 1.5% | 1 | 102 | 1.0% | 1 | 1 | 41 | 2.4% | 2 | 163 | 1.2% | 0.4918 |
| REL | 3 | 204 | 1.5% | 1 | 102 | 1.0% | 1 | 0 | 41 | 0.0% | 3 | 163 | 1.8% | 1 |
| PIK3R1 | 3 | 204 | 1.5% | 3 | 159 | 1.9% | 1 | 1 | 41 | 2.4% | 2 | 163 | 1.2% | 0.4918 |
| TAF4B | 3 | 204 | 1.5% | 2 | 159 | 1.3% | 1 | 1 | 41 | 2.4% | 2 | 163 | 1.2% | 0.4918 |
| BRD4 | 4 | 204 | 2.0% | 3 | 159 | 1.9% | 1 | 0 | 41 | 0.0% | 4 | 163 | 2.5% | 0.5853 |
| RB1 | 4 | 204 | 2.0% | 2 | 102 | 2.0% | 1 | 0 | 41 | 0.0% | 4 | 163 | 2.5% | 0.5853 |
| IKZF2 | 1 | 204 | 0.5% | 1 | 102 | 1.0% | 1 | 0 | 41 | 0.0% | 1 | 163 | 0.6% | 1 |
| MLH3 | 1 | 204 | 0.5% | 1 | 102 | 1.0% | 1 | 0 | 41 | 0.0% | 1 | 163 | 0.6% | 1 |
| NFKB1 | 1 | 204 | 0.5% | 1 | 102 | 1.0% | 1 | 0 | 41 | 0.0% | 1 | 163 | 0.6% | 1 |
| XRCC6 | 1 | 204 | 0.5% | 1 | 102 | 1.0% | 1 | 0 | 41 | 0.0% | 1 | 163 | 0.6% | 1 |
| PBX1 | 2 | 204 | 1.0% | 2 | 159 | 1.3% | 1 | 0 | 41 | 0.0% | 2 | 163 | 1.2% | 1 |
| PRKCQ | 2 | 204 | 1.0% | 2 | 159 | 1.3% | 1 | 1 | 41 | 2.4% | 1 | 163 | 0.6% | 0.3624 |
| NRAS | 2 | 204 | 1.0% | 1 | 102 | 1.0% | 1 | 0 | 41 | 0.0% | 2 | 163 | 1.2% | 1 |
| PIK3CA | 2 | 204 | 1.0% | 1 | 102 | 1.0% | 1 | 1 | 41 | 2.4% | 1 | 163 | 0.6% | 0.3624 |
| RELB | 2 | 204 | 1.0% | 1 | 102 | 1.0% | 1 | 0 | 41 | 0.0% | 2 | 163 | 1.2% | 1 |

TABLE 12
Detection of HBV DNA by
RT-PCR in tumor DNA and cDNA
derived from HBsAg+ DLBCLs

| | | CT value | CT value |
|---|---|---|---|
| | HBS | for DNA | for cDNA |
| Sample | Ag | detection* | detection* |
| DL29 | + | 34.66 | No |
| DL31 | + | 34.13 | No |
| DL34 | + | 38.04 | No |
| DL35 | + | 30.85 | No |
| DL68 | + | 25.99 | 31.76 |
| DL95 | + | 35.53 | No |
| DL99 | + | 35.31 | No |
| DL102 | + | 32.97 | No |
| DL103 | + | 38.21 | No |
| DL104 | + | 36.47 | No |
| DL106 | + | 23.50 | 35.84 |
| DL108 | + | 30.64 | No |
| DL111 | + | 26.85 | No |
| DL117 | + | 28.34 | No |
| DL118 | + | 33.29 | No |
| DL124 | + | 26.40 | No |
| DL138 | + | 38.07 | No |
| DL139 | + | 26.09 | 30.69 |
| DL152 | + | 26.44 | 31.12 |
| DL161 | + | 27.87 | 31.83 |
| DL566 | + | 34.48 | NA |
| DL26 | + | No | No |
| DL33 | + | No | No |
| DL72 | + | No | No |
| DL86 | + | No | No |
| DL89 | + | No | No |
| DL92 | + | No | No |
| DL98 | + | No | No |
| DL113 | + | No | No |
| DL120 | + | No | No |
| DL147 | + | No | No |
| DL150 | + | No | No |
| DL154 | + | No | No |
| DL162 | + | No | No |
| DL172 | + | No | No |
| DL522 | + | No | No |
| DL530 | + | No | NA |
| DL551 | + | No | NA |
| DL552 | + | No | NA |
| DL581 | + | No | NA |
| DL605 | + | No | NA |

*CT value <40 was considered as positive.

TABLE 13
Mutation frequency in HBsAg+ and HBsAg− Chinese lung adenocarcinoma samples

| | Chinese lung adenocarcinoma | | | | | | |
|---|---|---|---|---|---|---|---|
| | HBsAg+, | HBsAg+, | % in | HBsAg−, | HBsAg−, | % in | |
| gene | WT | MUT | HBsAg+ | WT | MUT | HBsAg− | p_value |
| TAF1 | 134 | 8 | 5.6 | 230 | 1 | 0.4 | 0.002 |
| ATP6V0Al | 136 | 6 | 4.2 | 231 | 0 | 0.0 | 0.003 |
| GABRA4 | 136 | 6 | 4.2 | 231 | 0 | 0.0 | 0.003 |
| SIGLEC12 | 136 | 6 | 4.2 | 231 | 0 | 0.0 | 0.003 |
| TTC3 | 133 | 9 | 6.3 | 229 | 2 | 0.9 | 0.004 |
| ATP9A | 135 | 7 | 4.9 | 230 | 1 | 0.4 | 0.006 |
| AP2B1 | 136 | 6 | 4.2 | 230 | 1 | 0.4 | 0.014 |
| ASAP2 | 136 | 6 | 4.2 | 230 | 1 | 0.4 | 0.014 |
| BCL11A | 136 | 6 | 4.2 | 230 | 1 | 0.4 | 0.014 |
| DISC1 | 136 | 6 | 4.2 | 230 | 1 | 0.4 | 0.014 |
| DNMT3A | 136 | 6 | 4.2 | 230 | 1 | 0.4 | 0.014 |
| FAM5B | 136 | 6 | 4.2 | 230 | 1 | 0.4 | 0.014 |
| PLCG1 | 136 | 6 | 4.2 | 230 | 1 | 0.4 | 0.014 |
| SEZ6L | 136 | 6 | 4.2 | 230 | 1 | 0.4 | 0.014 |
| SLC9A3 | 136 | 6 | 4.2 | 230 | 1 | 0.4 | 0.014 |
| SLITRK6 | 136 | 6 | 4.2 | 230 | 1 | 0.4 | 0.014 |
| ZFHX3 | 136 | 6 | 4.2 | 230 | 1 | 0.4 | 0.014 |
| ACACB | 142 | 0 | 0.0 | 221 | 10 | 4.3 | 0.016 |
| FMN2 | 140 | 2 | 1.4 | 216 | 15 | 6.5 | 0.022 |
| KALRN | 134 | 8 | 5.6 | 228 | 3 | 1.3 | 0.024 |
| SCN1A | 134 | 8 | 5.6 | 228 | 3 | 1.3 | 0.024 |
| NCAM1 | 132 | 10 | 7.0 | 226 | 5 | 2.2 | 0.028 |
| ACAN | 135 | 7 | 4.9 | 229 | 2 | 0.9 | 0.03 |
| LRRK2 | 135 | 7 | 4.9 | 229 | 2 | 0.9 | 0.03 |
| MAN2A1 | 135 | 7 | 4.9 | 229 | 2 | 0.9 | 0.03 |
| WAPAL | 135 | 7 | 4.9 | 229 | 2 | 0.9 | 0.03 |
| ADAMTS7 | 137 | 5 | 3.5 | 230 | 1 | 0.4 | 0.032 |
| ANO6 | 137 | 5 | 3.5 | 230 | 1 | 0.4 | 0.032 |
| ATP1A2 | 137 | 5 | 3.5 | 230 | 1 | 0.4 | 0.032 |
| C6orf170 | 137 | 5 | 3.5 | 230 | 1 | 0.4 | 0.032 |
| EXO1 | 137 | 5 | 3.5 | 230 | 1 | 0.4 | 0.032 |
| GLG1 | 137 | 5 | 3.5 | 230 | 1 | 0.4 | 0.032 |
| GRIA3 | 137 | 5 | 3.5 | 230 | 1 | 0.4 | 0.032 |
| IIECW1 | 137 | 5 | 3.5 | 230 | 1 | 0.4 | 0.032 |
| KDM4C | 137 | 5 | 3.5 | 230 | 1 | 0.4 | 0.032 |
| MAGEC3 | 137 | 5 | 3.5 | 230 | 1 | 0.4 | 0.032 |
| NR4A2 | 137 | 5 | 3.5 | 230 | 1 | 0.4 | 0.032 |
| PDZRN4 | 137 | 5 | 3.5 | 230 | 1 | 0.4 | 0.032 |
| PGLYRP4 | 137 | 5 | 3.5 | 230 | 1 | 0.4 | 0.032 |
| PIWIL4 | 137 | 5 | 3.5 | 230 | 1 | 0.4 | 0.032 |
| PPARGC1A | 137 | 5 | 3.5 | 230 | 1 | 0.4 | 0.032 |
| SKIV2L | 137 | 5 | 3.5 | 230 | 1 | 0.4 | 0.032 |
| SNRNP200 | 137 | 5 | 3.5 | 230 | 1 | 0.4 | 0.032 |
| TGFBRAP1 | 137 | 5 | 3.5 | 230 | 1 | 0.4 | 0.032 |
| TRPM2 | 137 | 5 | 3.5 | 230 | 1 | 0.4 | 0.032 |
| ZNF334 | 137 | 5 | 3.5 | 230 | 1 | 0.4 | 0.032 |
| EPHA4 | 133 | 9 | 6.3 | 227 | 4 | 1.7 | 0.037 |
| AFF2 | 135 | 7 | 4.9 | 228 | 3 | 1.3 | 0.047 |
| ASPM | 135 | 7 | 4.9 | 228 | 3 | 1.3 | 0.047 |
| C3 | 135 | 7 | 4.9 | 228 | 3 | 1.3 | 0.047 |
| CPS1 | 135 | 7 | 4.9 | 228 | 3 | 1.3 | 0.047 |
| KIF19 | 135 | 7 | 4.9 | 228 | 3 | 1.3 | 0.047 |
| NOTCH2 | 135 | 7 | 4.9 | 228 | 3 | 1.3 | 0.047 |
| ARAP3 | 142 | 0 | 0.0 | 224 | 7 | 3.0 | 0.047 |
| HGF | 142 | 0 | 0.0 | 224 | 7 | 3.0 | 0.047 |
| IQGAP 3 | 142 | 0 | 0.0 | 224 | 7 | 3.0 | 0.047 |
| KIAA2022 | 142 | 0 | 0.0 | 224 | 7 | 3.0 | 0.047 |
| SF3B3 | 142 | 0 | 0.0 | 224 | 7 | 3.0 | 0.047 |
| C12orf51 | 133 | 9 | 6.3 | 226 | 5 | 2.2 | 0.05 |
| FREM2 | 130 | 12 | 8.5 | 223 | 8 | 3.5 | 0.056 |
| C1orf125 | 141 | 1 | 0.7 | 221 | 10 | 4.3 | 0.058 |
| ARHGAP22 | 136 | 6 | 4.2 | 229 | 2 | 0.9 | 0.058 |
| CCDC136 | 136 | 6 | 4.2 | 229 | 2 | 0.9 | 0.058 |
| DIP2C | 136 | 6 | 4.2 | 229 | 2 | 0.9 | 0.058 |
| NLGN4X | 136 | 6 | 4.2 | 229 | 2 | 0.9 | 0.058 |
| OR8H2 | 136 | 6 | 4.2 | 229 | 2 | 0.9 | 0.058 |
| PLYND1 | 136 | 6 | 4.2 | 229 | 2 | 0.9 | 0.058 |
| RPS6KA6 | 136 | 6 | 4.2 | 229 | 2 | 0.9 | 0.058 |
| SH3TC2 | 136 | 6 | 4.2 | 229 | 2 | 0.9 | 0.058 |
| TEK | 136 | 6 | 4.2 | 229 | 2 | 0.9 | 0.058 |
| YTHDC2 | 136 | 6 | 4.2 | 229 | 2 | 0.9 | 0.058 |
| GLI2 | 134 | 8 | 5.6 | 227 | 4 | 1.7 | 0.065 |
| TSC2 | 134 | 8 | 5.6 | 227 | 4 | 1.7 | 0.065 |
| FILIP1 | 134 | 8 | 5.6 | 226 | 5 | 2.2 | 0.087 |
| ADAM2 | 142 | 0 | 0.0 | 225 | 6 | 2.6 | 0.087 |
| AFTPH | 142 | 0 | 0.0 | 225 | 6 | 2.6 | 0.087 |
| CNTN2 | 142 | 0 | 0.0 | 225 | 6 | 2.6 | 0.087 |
| FILIP1L | 142 | 0 | 0.0 | 225 | 6 | 2.6 | 0.087 |
| FMO3 | 142 | 0 | 0.0 | 225 | 6 | 2.6 | 0.087 |
| NFKBIL2 | 142 | 0 | 0.0 | 225 | 6 | 2.6 | 0.087 |
| PCDHGA4 | 142 | 0 | 0.0 | 225 | 6 | 2.6 | 0.087 |
| PLCH1 | 142 | 0 | 0.0 | 225 | 6 | 2.6 | 0.087 |
| PODXL | 142 | 0 | 0.0 | 225 | 6 | 2.6 | 0.087 |
| POSTN | 142 | 0 | 0.0 | 225 | 6 | 2.6 | 0.087 |
| PRKDC | 142 | 0 | 0.0 | 225 | 6 | 2.6 | 0.087 |
| SCEL | 142 | 0 | 0.0 | 225 | 6 | 2.6 | 0.087 |
| SLC9A4 | 142 | 0 | 0.0 | 225 | 6 | 2.6 | 0.087 |
| TLE1 | 142 | 0 | 0.0 | 225 | 6 | 2.6 | 0.087 |
| USP20 | 142 | 0 | 0.0 | 225 | 6 | 2.6 | 0.087 |
| ZNF665 | 142 | 0 | 0.0 | 225 | 6 | 2.6 | 0.087 |
| AKAP11 | 136 | 6 | 4.2 | 228 | 3 | 1.3 | 0.089 |
| AQR | 136 | 6 | 4.2 | 228 | 3 | 1.3 | 0.089 |
| ASTN1 | 136 | 6 | 4.2 | 228 | 3 | 1.3 | 0.089 |
| COL1A2 | 136 | 6 | 4.2 | 228 | 3 | 1.3 | 0.089 |
| DDX60L | 136 | 6 | 4.2 | 228 | 3 | 1.3 | 0.089 |
| DMBT1 | 136 | 6 | 4.2 | 228 | 3 | 1.3 | 0.089 |
| DMXL1 | 136 | 6 | 4.2 | 228 | 3 | 1.3 | 0.089 |
| GRIA2 | 136 | 6 | 4.2 | 228 | 3 | 1.3 | 0.089 |
| LRRK1 | 136 | 6 | 4.2 | 228 | 3 | 1.3 | 0.089 |
| PXDN | 136 | 6 | 4.2 | 228 | 3 | 1.3 | 0.089 |
| TSC1 | 136 | 6 | 4.2 | 228 | 3 | 1.3 | 0.089 |
| MAST4 | 141 | 1 | 0.7 | 222 | 9 | 3.9 | 0.097 |
| MYH4 | 141 | 1 | 0.7 | 222 | 9 | 3.9 | 0.097 |
| SPTBN4 | 141 | 1 | 0.7 | 222 | 9 | 3.9 | 0.097 |

p < 0.1 was included

TABLE 14
Performance of WGS, WES and lymphochip

| | Mean | min | max |
|---|---|---|---|
| 47 paired Illumina WGS | | | |
| Average sequencing depth on target (x) | 37 | 29 | 43 |
| Coverage of target region | 98.99% | 98.31% | 99.58% |
| Fraction of target covered with at least 20x | 92.52% | 84.76% | 96.07% |
| Fraction of target covered with at least 10x | 97.88% | 97.15% | 98.41% |
| Fraction of target covered with at least 4x | 98.95% | 98.51% | 99.46% |
| 47 paired WES | | | |
| Average sequencing depth on target (x) | 92 | 55 | 135 |
| Coverage of target region | 99.03% | 98.15% | 99.55% |
| Fraction of target covered with at least 20x | 87.80% | 79.70% | 93.40% |
| Fraction of target covered with at least 10x | 93.60% | 89.05% | 96.45% |
| Fraction of target covered with at least 4x | 97.02% | 94.95% | 98.35% |
| 13 paired Guangzhou DLBCL CG WGS | | | |
| Both mates mapped yield (Gb) | 303 | 290 | 315 |
| Fraction of target covered with at least 30x | 98.29% | 97.50% | 98.70% |
| Fraction of target covered with at least 20x | 99.15% | 98.90% | 99.30% |
| Fraction of target covered with at least 10x | 99.60% | 99.60% | 99.70% |
| Fraction of target covered with at least 5x | 99.80% | 99.80% | 99.80% |
| 111 samples for lymphochip | | | |
| Average sequencing depth on target (x) | 384 | 64 | 792 |
| Fraction of target covered with at least 100x | 99.87% | 99.28% | 99.98% |
| Fraction of target covered with at least 30x | 99.93% | 99.64% | 99.99% |
| Fraction of target covered with at least 10x | 99.96% | 99.78% | 99.99% |

TABLE 15
Characterization of V(D)J rearrangements in
DLBCL tumors (SEQ ID NO: 828-854)

| DNA | DNA | DNA | DNA | DNA | | DNA | DNA | DNA | DNA | DNA | Template |
|---|---|---|---|---|---|---|---|---|---|---|---|
| High | Cloning/High | High | Cloning/High | High | | High | High | High | Cloning | Cloning | Methods |
| throughput | through | throughput | through | throughput | | throughput | throughput | throughput | | | |
| 134033 | 248502 | 210033 | 216960 | 401299 | | 273099 | 353428 | 165736 | 14/14 | 15/15 | Clone |
| | | | | | | | | | | | Count |
| 36.9 | 64.5 | 33.3 | 85.7 | 90.3 | | 95.3 | 97 | 99.8 | 100 | 100 | Major clone |
| | | | | | | | | | | | Fraction |
| Other | Other | | | | | | | | | | Comments |
| clones < 0.1 | clones < 0.11 | | | | | | | | | | |
| Productive | Productive | Productive | Productive | Productive | | Productive | Productive | Productive | Unproductive | Productive | Re- |
| | | | | | | | | | | | arrangeme |
| 17 | 7 | 29 | 6 | 38 | | 49 | 37 | 14 | 35 | 32 | No. of |
| | | | | | | | | | | | mutations |
| 91.75 | 96.55 | 85.85 | 97.07 | 81.9 | | 77 | 82.3 | 93.33 | 81.77 | 86.94 | Identify to |
| | | | | | | | | | | | germline |
| V3-13 | V4-34 | V4-34 | V4-34 | V3-23 | | V4-39 | V3-43 | V3-11 | V1-69 | V3-66 | VH |
| D6-13 | D2-15 | D2-21 | D3-22 | D5-24 | | D1-7 | D5-24 | D1-14 | D3-9 | D6-19 | DH |
| J6 | J4 | J5 | J6 | J1 | | J4 | J4 | J3 | J5 | J4 | JH |
| CARGGSSR | CATSGVVVA | CARNMTFW | CARLTYYYD | CMSEIDAKS | | CVRHGNYLF | CVKGVGRD | CARDPSGFD | CARGISGLLT | CVRWAGTL | CDR3 |
| WSFYYYYG | TPHW | | SSGNPDYYG | GSENTEYLH | | LPFDSW | GYNPIDYW | IW | DKSALHMW | W | |
| 20 | 13 | 8 | 22 | 20 | | 15 | 16 | 11 | 18 | 9 | Length |
| No | No | No | No | No | | No | No | No | — | No | Hornology |
| | | | | | | | | | | | to HBV |
| DNA | DNA | DNA | DNA | DNA | DNA | DNA | cDNA | cDNA | DNA | DNA | DNA |
| High | High | High | Cloning | Cloning | Cloning | Cloning | Cloning | Cloning | High | High | High |
| throughput | throughput | throughput | | | | | | | throughput | throughput | throughput |
| 446110 | 295155 | 371839 | 13/13 | 43384 | 15/15 | 15/15 | 16/31 | 6/9 | 50326 | 109318 | 61572 |
| 93.3 | 98 | 98.7 | 100 | 90.9 | 100 | 100 | 51.6 | 66.7 | 10 | 11.8 | 21.8 |
| | | | | | | | | | Other | Other | Other |
| | | | | | | | | | clones < 0.5 | clones < 0.5 | clones < 0.7 |
| Productive | Productive | Productive | Productive | Productive | Productive | Productive | Productive | Productive | Productive | Productive | Unproductive |
| 16 | 23 | 28 | 9 | 48 | 23 | 14 | 39 | 74 | 32 | 86 | 28 |
| 92.34 | 88.94 | 86.41 | 96.36 | 81.03 | 90.69 | 94.33 | 84.08 | 69.55 | 84.62 | 60.55 | 86.21 |
| V3-30 | V3-21 | V3-66 | V4-34 | V4-39 | V4-34 | V4-34 | V1-18 | V3-23 | V3-23 | V4-59 | V3-9 |
| D1-26 | D3-9 | D3-3 | D6-6 | D1-26 | D4-23 | D5-12 | D3-10 | D3-3 | D3-10 | D2-8 | D3-16 |
| J1 | J6 | J4 | J6 | J4 | J5 | J6 | J4 | J1 | J4 | J5 | J5 |
| CARVGAGG | CARAGDYDL | CVRGKSGVA | CAGGYGDSS | CVRHGNYLF | CARTMSTV | CARGNIVAT | CARISLIRETI | CVLYLTPVLS | CAKRGGDY | CVRRPRSRII | CVKAQSPQT |
| EWELLRHLQ | LTGSPGYYY | SFDYW | SSPQYYYG | LPFDSW | VTPGPAWF | ITAVGYYMD | TFPPDFW | GLTYHW | W | KLLMGDEA | AWGPQGEP |
| 19 | 24 | 14 | 21 | 15 | 19 | 20 | 8 | 16 | 9 | 19 | — |
| | No | No | No | No | No | No | No | No | No | No | — |

| | | | | |
|---|---|---|---|---|
| cDNA | DNA | DNA | DNA | DNA |
| Cloning | High | High | High | High |
| | throughput | throughput | throughput | throughput |
| 10/10 | 269684 | 412260 | 73000 | 461366 |
| 100 | 77 | 79.2 | 92 | 92.1 |
| Productive | Productive | Productive | Productive | Productive |
| 16 | 11 | 41 | 35 | 14 |
| 93.47 | 94.63 | 79.8 | 83.01 | 93.43 |
| V3-48 | V4-34 | V3-74 | V3-7 | V4-31 |
| D3-22 | D3-16 | D3-3 | D2-21 | D5-24 |
| J4 | J4 | J5 | J4 | J4 |
| CASLPAVITR | CARLGLLTP | CVSGFSTGF | VAKDWGGE | CARDRDGYS |
| GDYW | KYFDNW | SQW | EDYW | FFDYW |
| 14 | 15 | 12 | 12 | 14 |
| No | No | No | No | No |

1. Cloning, >= 9 clones in total, the frequency of major clones was more than 50%.
2. High throughput, the frequency of major clone was at least 20 times more than the second clone.

TABLE 16
Mutation frequency in HBsAg⁺ and HBsAg⁻ Chinese lung adenocarcinoma samples

| | | HBsAg+ | | HBsAg− | | | |
|---|---|---|---|---|---|---|---|
| | Total | No. of | Mutation | Total | No. orf | Mutation | |
| Gene | samples | Mutated samples | frequency | samples | Mutated samples | frequency | P value |
| TAFI | 134 | 8 | 5.6% | 230 | 1 | 0.4% | 0.0020 |
| ATP6VOAI | 136 | 6 | 4.2% | 231 | 0 | 0.0% | 0.0030 |
| GABRA4 | 136 | 6 | 4.2% | 231 | 0 | 0.0% | 0.0030 |
| SIGLEC12 | 136 | 6 | 4.2% | 231 | 0 | 0.0% | 0.0030 |
| TTC3 | 133 | 9 | 6.3% | 229 | 2 | 0.9% | 0.0040 |
| ATP9A | 135 | 7 | 4.9% | 230 | 1 | 0.4% | 0.0060 |
| AP2BI | 136 | 6 | 4.2% | 230 | 1 | 0.4% | 0.0140 |
| ASAP2 | 136 | 6 | 4.2% | 230 | 1 | 0.4% | 0.0140 |
| BCL11A | 136 | 6 | 4.2% | 230 | 1 | 0.4% | 0.0140 |
| DISC1 | 136 | 6 | 4.2% | 230 | 1 | 0.4% | 0.0140 |
| DNMT3A | 136 | 6 | 4.2% | 230 | 1 | 0.4% | 0.0140 |
| FAM5B | 136 | 6 | 4.2% | 230 | 1 | 0.4% | 0.0140 |
| PLCG1 | 136 | 6 | 4.2% | 230 | 1 | 0.4% | 0.0140 |
| SEZ6L | 136 | 6 | 4.2% | 230 | 1 | 0.4% | 0.0140 |
| SLC9A3 | 136 | 6 | 4.2% | 230 | 1 | 0.4% | 0.0140 |
| SLITRK6 | 136 | 6 | 4.2% | 230 | 1 | 0.4% | 0.0140 |
| ZFHX3 | 136 | 6 | 4.2% | 230 | 1 | 0.4% | 0.0140 |
| ACACB | 142 | 0 | 0.0% | 221 | 10 | 4.3% | 0.0160 |
| FMN2 | 140 | 2 | 1.4% | 216 | 15 | 6.5% | 0.0220 |
| KALRN | 134 | 8 | 5.6% | 228 | 3 | 1.3% | 0.0240 |
| SCN1A | 134 | 8 | 5.6% | 228 | 3 | 1.3% | 0.0240 |
| NCAM1 | 132 | 10 | 7.0% | 226 | 5 | 2.2% | 0.0280 |
| AGAN | 135 | 7 | 4.9% | 229 | 2 | 0.9% | 0.0300 |
| LRRK2 | 135 | 7 | 4.9% | 229 | 2 | 0.9% | 0.0300 |
| MAN2A1 | 135 | 7 | 4.9% | 229 | 2 | 0.9% | 0.0300 |
| WAPAL | 135 | 7 | 4.9% | 229 | 2 | 0.9% | 0.0300 |
| ADAMTS7 | 137 | 5 | 3.5% | 230 | 1 | 0.4% | 0.0320 |
| ANO6 | 137 | 5 | 3.5% | 230 | 1 | 0.4% | 0.0320 |
| ATP1A2 | 137 | 5 | 3.5% | 230 | 1 | 0.4% | 0.0320 |
| C6orf170 | 137 | 5 | 3.5% | 230 | 1 | 0.4% | 0.0320 |
| EVO1 | 137 | 5 | 3.5% | 230 | 1 | 0.4% | 0.0320 |
| GLGI | 137 | 5 | 3.5% | 230 | 1 | 0.4% | 0.0320 |
| GRIA3 | 137 | 5 | 3.5% | 230 | 1 | 0.4% | 0.0320 |
| HECWI | 137 | 5 | 3.5% | 230 | 1 | 0.4% | 0.0320 |
| KDM4C | 137 | 5 | 3.5% | 230 | 1 | 0.4% | 0.0320 |
| MAGEC3 | 137 | 5 | 3.5% | 230 | 1 | 0.4% | 0.0320 |
| NR4A2 | 137 | 5 | 3.5% | 230 | 1 | 0.4% | 0.0320 |
| PDZRN4 | 137 | 5 | 3.5% | 230 | 1 | 0.4% | 0.0320 |
| PGLYRP4 | 137 | 5 | 3.5% | 230 | 1 | 0.4% | 0.0320 |
| PIWIL4 | 137 | 5 | 3.5% | 230 | 1 | 0.4% | 0.0320 |
| PPARGCIA | 137 | 5 | 3.5% | 230 | 1 | 0.4% | 0.0320 |
| SKIV2L | 137 | 5 | 3.5% | 230 | 1 | 0.4% | 0.0320 |
| SNRNP200 | 137 | 5 | 3.5% | 230 | 1 | 0.4% | 0.0320 |
| TGFBRAPI | 137 | 5 | 3.5% | 230 | 1 | 0.4% | 0.0320 |
| TRPM2 | 137 | 5 | 3.5% | 230 | 1 | 0.4% | 0.0320 |
| ZNF334 | 137 | 5 | 3.5% | 230 | 1 | 0.4% | 0.0320 |
| EPHA4 | 133 | 9 | 6.3% | 227 | 4 | 1.7% | 0.0370 |
| AFF2 | 135 | 7 | 4.9% | 228 | 3 | 1.3% | 0.0470 |
| ASPM | 135 | 7 | 4.9% | 228 | 3 | 1.3% | 0.0470 |
| C3 | 135 | 7 | 4.9% | 228 | 3 | 1.3% | 0.0470 |
| CPS1 | 135 | 7 | 4.9% | 228 | 3 | 1.3% | 0.0470 |
| KIF19 | 135 | 7 | 4.9% | 228 | 3 | 1.3% | 0.0470 |
| NOTCH 2 | 135 | 7 | 4.9% | 228 | 3 | 1.3% | 0.0470 |
| ARAP3 | 142 | 0 | 0.0% | 224 | 7 | 3.0% | 0.0470 |
| HGF | 142 | 0 | 0.0% | 224 | 7 | 3.0% | 0.0470 |
| IQGAP3 | 142 | 0 | 0.0% | 224 | 7 | 3.0% | 0.0470 |
| KIAA2022 | 142 | 0 | 0.0% | 224 | 7 | 3.0% | 0.0470 |
| SF383 | 142 | 0 | 0.0% | 224 | 7 | 3.0% | 0.0470 |
| C12orf51 | 133 | 9 | 6.3% | 226 | 5 | 2.2% | 0.0500 |
| FREM2 | 130 | 12 | 8.5% | 223 | 8 | 3.5% | 0.0560 |
| Clolf/15 | 141 | 1 | 0.7% | 221 | 10 | 4.3% | 0.0580 |
| ARIIGAPII | 136 | 6 | 4.2% | 229 | 2 | 0.9% | 0.0580 |
| CCDC/36 | 136 | 6 | 4.2% | 229 | 2 | 0.9% | 0.0580 |
| D/PlC | 136 | 6 | 4.2% | 229 | 2 | 0.9% | 0.0580 |
| NLGN4X | 136 | 6 | 4.2% | 229 | 2 | 0.9% | 0.0580 |
| ORS/12 | 136 | 6 | 4.2% | 229 | 2 | 0.9% | 0.0580 |
| PLXNDI | 136 | 6 | 4.2% | 229 | 2 | 0.9% | 0.0580 |
| RPS6KA6 | 136 | 6 | 4.2% | 229 | 2 | 0.9% | 0.0580 |
| Sl/3TC2 | 136 | 6 | 4.2% | 229 | 2 | 0.9% | 0.0580 |
| TEK | 136 | 6 | 4.2% | 229 | 2 | 0.9% | 0.0580 |
| YTIIDC2 | 136 | 6 | 4.2% | 229 | 2 | 0.9% | 0.0580 |
| GU2 | 134 | 8 | 5.6% | 227 | 4 | 1.7% | 0.0650 |
| TSC2 | 134 | 8 | 5.6% | 227 | 4 | 1.7% | 0.0650 |
| FIUP1 | 134 | 8 | 5.6% | 226 | 5 | 2.2% | 0.0870 |
| ADAM1 | 142 | 0 | 0.0% | 225 | 6 | 2.6% | 0.0870 |
| AFTP/1 | 142 | 0 | 0.0% | 225 | 6 | 2.6% | 0.0870 |
| CNTN1 | 142 | 0 | 0.0% | 225 | 6 | 2.6% | 0.0870 |
| FIUPIL | 142 | 0 | 0.0% | 225 | 6 | 2.6% | 0.0870 |
| FMO3 | 142 | 0 | 0.0% | 225 | 6 | 2.6% | 0.0870 |
| NFKBIL2 | 142 | 0 | 0.0% | 225 | 6 | 2.6% | 0.0870 |
| PCDIIGA4 | 142 | 0 | 0.0% | 225 | 6 | 2.6% | 0.0870 |
| PLC1/I | 142 | 0 | 0.0% | 225 | 6 | 2.6% | 0.0870 |
| PODXL | 142 | 0 | 0.0% | 225 | 6 | 2.6% | 0.0870 |
| POSTN | 142 | 0 | 0.0% | 225 | 6 | 2.6% | 0.0870 |
| PRKDC | 142 | 0 | 0.0% | 225 | 6 | 2.6% | 0.0870 |
| SCEL | 142 | 0 | 0.0% | 225 | 6 | 2.6% | 0.0870 |
| SLCYJA4 | 142 | 0 | 0.0% | 225 | 6 | 2.6% | 0.0870 |
| TLEI | 142 | 0 | 0.0% | 225 | 6 | 2.6% | 0.0870 |
| USPl0 | 142 | 0 | 0.0% | 225 | 6 | 2.6% | 0.0870 |
| ZNF665 | 142 | 0 | 0.0% | 225 | 6 | 2.6% | 0.0870 |
| AKAPII | 136 | 6 | 4.2% | 228 | 3 | 1.3% | 0.0890 |
| AQlI | 136 | 6 | 4.2% | 228 | 3 | 1.3% | 0.0890 |
| ASTNI | 136 | 6 | 4.2% | 228 | 3 | 1.3% | 0.0890 |
| COL/A1 | 136 | 6 | 4.2% | 228 | 3 | 1.3% | 0.0890 |
| DDX60l | 136 | 6 | 4.2% | 228 | 3 | 1.3% | 0.0890 |
| DMBTI | 136 | 6 | 4.2% | 228 | 3 | 1.3% | 0.0890 |
| DMXLI | 136 | 6 | 4.2% | 228 | 3 | 1.3% | 0.0890 |
| GR/Al | 136 | 6 | 4.2% | 228 | 3 | 1.3% | 0.0890 |
| LRRKI | 136 | 6 | 4.2% | 228 | 3 | 1.3% | 0.0890 |
| PXDN | 136 | 6 | 4.2% | 228 | 3 | 1.3% | 0.0890 |
| TSCI | 136 | 6 | 4.2% | 228 | 3 | 1.3% | 0.0890 |
| MAST4 | 141 | 1 | 0.7% | 222 | 9 | 3.9% | 0.0970 |
| MAST4 | 141 | 1 | 0.7% | 222 | 9 | 3.9% | 0.0970 |
| SPTBN4 | 141 | 1 | 0.7% | 227 | 9 | 3.9% | 0.0970 |

P value was calculated by X²-test or Fisher's exact test. p < 0.1 was included.

TABLE 17
Performance of WGS, WES and lymphochip

| | Mean | Min | Max |
|---|---|---|---|
| 47 paired Illumina WGS | | | |
| Average sequencing depth on target (x) | 37 | 29 | 43 |
| Coverage of target region | 98.99% | 98.31% | 99.58% |
| Fraction of target covered with at least 20x | 92.52% | 84.76% | 96.07% |
| Fraction of target covered with at least 10x | 97.88% | 97.15% | 98.41% |
| Fraction of target covered with at least 4x | 98.95% | 98.51% | 99.46% |
| 47 paired WES | | | |
| Average sequencing depth on target (x) | 92 | 55 | 135 |
| Coverage of target region | 99.03% | 98.15% | 99.55% |
| Fraction of target covered with at least 20x | 87.80% | 79.70% | 93.40% |
| Fraction of target covered with at least 10x | 93.60% | 89.05% | 96.45% |
| Fraction of target covered with at least 4x | 97.02% | 94.95% | 98.35% |
| 13 paired Guangzhou DLBCL CG WGS | | | |
| Both mates mapped yield (Gb) | 303 | 290 | 315 |
| Fraction of target covered with at least 30x | 98.29% | 97.50% | 98.70% |
| Fraction of target covered with at least 20x | 99.15% | 98.90% | 99.30% |
| Fraction of target covered with at least 10x | 99.60% | 99.60% | 99.70% |
| Fraction of target covered with at least 5x | 99.80% | 99.80% | 99.80% |
| 198 samples for lymphochip | | | |
| Average sequencing depth on target (x) | 704 | 64 | 1759 |
| Fraction of target covered with at least | 99.92% | 99.28% | 99.99 |
| 100x | | | |
| Fraction of target covered with at least 30x | 99.96% | 99.64% | 99.99%% |
| Fraction of target covered with at least 10x | 99.98% | 99.78% | 99.99% |

### REFERENCES

[1307] 1. Alizadeh, A. A. et al. Distinct types of diffuse large B-cell lymphoma identified by gene expression profiling. Nature 403, 503-11 (2000).
[1308] 2. Swerdlow, S. H. et al. The 2016 revision of the World Health Organization classification of lymphoid neoplasms. Blood 127, 2375-90 (2016).
[1309] 3. Morin, R. D. et al. Frequent mutation of histone-modifying genes in non-Hodgkin lymphoma. Nature 476, 298-303 (2011).
[1310] 4. Pasqualucci, L. et al. Analysis of the coding genome of diffuse large B-cell lymphoma. Nat Genet 43, 830-7 (2011).
[1311] 5. Lohr, J. G. et al. Discovery and prioritization of somatic mutations in diffuse large B-cell lymphoma (DLBCL) by whole-exome sequencing. Proc Natl Acad Sci USA 109, 3879-84 (2012).
[1312] 6. Morin, R. D. et al. Mutational and structural analysis of diffuse large B-cell lymphoma using whole-genome sequencing. Blood 122, 1256-65 (2013).
[1313] 7. Zhang, J. et al. Genetic heterogeneity of diffuse large B-cell lymphoma. Proc Natl Acad Sci USA 110, 1398-403 (2013).
[1314] 8. de Miranda, N. F. et al. Exome sequencing reveals novel mutation targets in diffuse large B-cell lymphomas derived from Chinese patients. Blood 124, 2544-53 (2014).
[1315] 9. Novak, A. J. et al. Whole-exome analysis reveals novel somatic genomic alterations associated with outcome in immunochemotherapy-treated diffuse large B-cell lymphoma. Blood Cancer J 5, e346 (2015).

[1316] 10. Georgiou, K. et al. Genetic basis of PD-L1 overexpression in diffuse large B-cell lymphomas. Blood 127, 3026-34 (2016).
[1317] 11. Reddy, A. et al. Genetic and Functional Drivers of Diffuse Large B Cell Lymphoma. Cell 171, 481-494 e15 (2017).
[1318] 12. Rosenquist, R., Bea, S., Du, M. Q., Nadel, B. & Pan-Hammarstrom, Q. Genetic landscape and deregulated pathways in B-cell lymphoid malignancies. J Intern Med (2017).
[1319] 13. Ren, W., Li, W., Ye, X., Liu, H. & Pan-Hammarstrom, Q. Distinct subtype distribution and somatic mutation spectrum of lymphomas in East Asia. Curr Opin Hematol 24, 367-376 (2017).
[1320] 14. Szczepanowski, M. et al. Cell-of-origin classification by gene expression and MYC-rearrangements in diffuse large B-cell lymphoma of children and adolescents. Br J Haematol (2017).
[1321] 15. de Miranda, N. F. et al. DNA repair genes are selectively mutated in diffuse large B cell lymphomas. J Exp Med 210, 1729-42 (2013).
[1322] 16. Kraan, W. et al. High prevalence of oncogenic MYD88 and CD79B mutations in diffuse large B-cell lymphomas presenting at immune-privileged sites. Blood Cancer J 3, e139 (2013).
[1323] 17. Cerhan, J. R. et al. Genetic variation in 1253 immune and inflammation genes and risk of non-Hodgkin lymphoma. Blood 110, 4455-63 (2007).
[1324] 18. Ramos, J. C. & Lossos, I. S. Newly emerging therapies targeting viral-related lymphomas. Curr Oncol Rep 13, 416-26 (2011).
[1325] 19. Maciocia, N., O'Brien, A. & Ardeshna, K. Remission of Follicular Lymphoma after Treatment for Hepatitis C Virus Infection. N Engl J Med 375, 1699-1701 (2016).
[1326] 20. Marcucci, F. et al. High prevalence of hepatitis B virus infection in B-cell non-Hodgkin's lymphoma. Haematologica 91, 554-7 (2006).
[1327] 21. Chen, M. H. et al. High prevalence of occult hepatitis B virus infection in patients with B cell non-Hodgkin's lymphoma. Ann Hematol 87, 475-80 (2008).
[1328] 22. Engels, E. A., Cho, E. R. & Jee, S. H. Hepatitis B virus infection and risk of non-Hodgkin lymphoma in South Korea. a cohort study. Lancet Oncol 11, 827-34 (2010).
[1329] 23. Dalia, S., Chavez, J., Castillo, J. J. & Sokol, L. Hepatitis B infection increases the risk of non-Hodgkin lymphoma: a meta-analysis of observational studies. Leuk Res 37, 1107-15 (2013).
[1330] 24. Deng, L. et al. Hepatitis B virus-associated diffuse large B-cell lymphoma: unique clinical features, poor outcome, and hepatitis B surface antigen-driven origin. Oncotarget 6, 25061-73 (2015).
[1331] 25. Cui, Y. & Jia, J. Update on epidemiology of hepatitis B and C in China. J Gastroenterol Hepatol 28 Suppl 1, 7-10 (2013).
[1332] 26. Qian, J. et al. B cell super-enhancers and regulatory clusters recruit AID tumorigenic activity. Cell 159, 1524-37 (2014).
[1333] 27. Kan, Z. et al. Diverse somatic mutation patterns and pathway alterations in human cancers. Nature 466, 869-73 (2010).
[1334] 28. Lawrence, M. S. et al. Mutational heterogeneity in cancer and the search for new cancer-associated genes. Nature 499, 214-8 (2013).
[1335] 29. Mularoni, L., Sabarinathan, R., Deu-Pons, J., Gonzalez-Perez, A. & Lopez-Bigas, N. OncodriveFML: a general framework to identify coding and non-coding regions with cancer driver mutations. Genome Biol 17, 128 (2016).
[1336] 30. Alexandrov, L. B. et al. Signatures of mutational processes in human cancer. Nature 500, 415-21 (2013).
[1337] 31. Goila-Gaur, R. & Strebel, K. HIV-1 Vif, APOBEC, and intrinsic immunity. Retrovirology 5, 51 (2008).
[1338] 32. Janahi, E. M. & McGarvey, M. J. The inhibition of hepatitis B virus by APOBEC cytidine deaminases. J Viral Hepat 20, 821-8 (2013).
[1339] 33. Szydlowski, M. et al. FOXO1 activation is an effector of SYK and AKT inhibition in tonic BCR signal-dependent diffuse large B-cell lymphomas. Blood 127, 739-48 (2016).
[1340] 34. Kikuchi, M. et al. Identification of negative regulatory regions within the first exon and intron of the BCL6 gene. Oncogene 19, 4941-5 (2000).
[1341] 35. Hart, G. T., Wang, X., Hogquist, K. A. & Jameson, S. C. Kruppel-like factor 2 (KLF2) regulates B-cell reactivity, subset differentiation, and trafficking molecule expression. Proc Natl Acad Sci USA 108, 716-21 (2011).
[1342] 36. Clipson, A. et al. KLF2 mutation is the most frequent somatic change in splenic marginal zone lymphoma and identifies a subset with distinct genotype. Leukemia 29, 1177-1185 (2015).
[1343] 37. Piva, R. et al. The Kruppel-like factor 2 transcription factor gene is recurrently mutated in splenic marginal zone lymphoma. Leukemia 29, 503-507 (2015).
[1344] 38. Newman, R. et al. Maintenance of the marginal-zone B cell compartment specifically requires the RNA-binding protein ZFP36L1. Nat Immunol 18, 683-693 (2017).
[1345] 39. Subramanian, A. et al. Gene set enrichment analysis: a knowledge-based approach for interpreting genome-wide expression profiles. Proc Natl Acad Sci USA 102, 15545-50(2005).
[1346] 40. Basso, K. et al. Integrated biochemical and computational approach identifies BCL6 direct target genes controlling multiple pathways in normal germinal center B cells. Blood 115, 975-84 (2010).
[1347] 41. Valls, E. et al. BCL6 Antagonizes NOTCH2 to Maintain Survival of Human Follicular Lymphoma Cells. Cancer Discovery 7, 506-521 (2017).
[1348] 42. Chan, C. H., Hadlock, K. G., Foung, S. K. H. & Levy, S. V(H)1-69 gene is preferentially used by hepatitis C virus-associated B cell lymphomas and by normal B cells responding to the E2 viral antigen. Blood 97, 1023-1026 (2001).
[1349] 43. Marcucci, F. & Mele, A. Hepatitis viruses and non-Hodgkin lymphoma: epidemiology, mechanisms of tumorigenesis, and therapeutic opportunities. Blood 117, 1792-8 (2011).
[1350] 44. Pontisso, P., Poon, M. C., Tiollais, P. & Brechot, C. Detection of hepatitis B virus DNA in mononuclear blood cells. Br Med J (Clin Res Ed) 288, 1563-6 (1984).
[1351] 45. Pontisso, P., Vidalino, L., Quarta, S. & Gatta, A. Biological and clinical implications of HBV infection in peripheral blood mononuclear cells. Autoimmun Rev 8, 13-7 (2008).
[1352] 46. Umeda, M. et al. Hepatitis B virus infection in lymphatic tissues in inactive hepatitis B carriers. J Hepatol 42, 806-12 (2005).
[1353] 47. Sung, W. K. et al. Genome-wide survey of recurrent HBV integration in hepatocellular carcinoma. Nat Genet 44, 765-9 (2012).
[1354] 48. Kock, J. & Blum, H. E. Hypermutation of hepatitis B virus genomes by APOBEC3G, APOBEC3C and APOBEC3H. J Gen Virol89, 1184-91 (2008).
[1355] 49. Huang, J. et al. Exome sequencing of hepatitis B virus-associated hepatocellular carcinoma. Nat Genet 44, 1117-21 (2012).
[1356] 50. Wu, K. et al. Frequent alterations in cytoskeleton remodelling genes in primary and metastatic lung adenocarcinomas. Nat Commun 6, 10131 (2015).
[1357] 51. Neuveut, C., Wei, Y. & Buendia, M. A. Mechanisms of HBV-related hepatocarcinogenesis. J Hepatol 52, 594-604 (2010).
[1358] 52. Dominguez-Sola, D. et al. The FOXO1 Transcription Factor Instructs the Germinal Center Dark Zone Program. Immunity 43, 1064-74 (2015).
[1359] 53. Cardenas, M. G. et al. Rationally designed BCL6 inhibitors target activated B cell diffuse large B cell lymphoma. J Clin Invest 126, 3351-62 (2016).
[1360] 54. Belloni, L. et al. Nuclear HBx binds the HBV minichromosome and modifies the epigenetic regulation of cccDNA function. Proc Natl Acad Sci USA 106, 19975-9 (2009).
[1361] 55. Zhang, J. et al. The CREBBP Acetyltransferase Is a Haploinsufficient Tumor Suppressor in B-cell Lymphoma. Cancer Discov 7, 322-337 (2017).
[1362] 56. Picaud, S. et al. Generation of a Selective Small Molecule Inhibitor of the CBP/p300 Bromodomain for Leukemia Therapy. Cancer Res 75, 5106-5119 (2015).
[1363] 57. Jacobs, J. et al. CD70: An emerging target in cancer immunotherapy. Pharmacol Ther 155, 1-10 (2015).
[1364] 58. Bullock, T. N. TNF-receptor superfamily agonists as molecular adjuvants for cancer vaccines. Curr Opin Immunol 47, 70-77 (2017).
[1365] 59. Fernandez-Marrero, Y., Spinner, S., Kaufmann, T. & Jost, P. J. Survival control of malignant lymphocytes by anti-apoptotic MCL-1. Leukemia 30, 2152-2159 (2016).
[1366] 60. Jiang, L. et al. Exome sequencing identifies somatic mutations of DDX3X in natural killer/T-cell lymphoma. Nat Genet 47, 1061-6 (2015).
[1367] 61. Welzel, T. M. et al. Real-time PCR assay for detection and quantification of hepatitis B virus genotypes A to G. J Clin Microbiol 44, 3325-33 (2006).
[1368] 62. Li, H. & Durbin, R. Fast and accurate short read alignment with Burrows-Wheeler transform. Bioinformatics 25, 1754-60 (2009).
[1369] 63. Koboldt, D. C. et al. VarScan: variant detection in massively parallel sequencing of individual and pooled samples. Bioinformatics 25, 2283-5 (2009).
[1370] 64. Li, R. et al. SNP detection for massively parallel whole-genome resequencing. Genome Res 19, 1124-32 (2009).
[1371] 65. Rimmer, A. et al. Integrating mapping-, assembly- and haplotype-based approaches for calling variants in clinical sequencing applications. Nat Genet 46, 912-8 (2014).
[1372] 66. Robinson, J. T. et al. Integrative genomics viewer. Nat Biotechnol 29, 24-6 (2011).
[1373] 67. Khodabakhshi, A. H. et al. Recurrent targets of aberrant somatic hypermutation in lymphoma. Oncotarget 3, 1308-19 (2012).
[1374] 68. Huang, J. et al. A reference human genome dataset of the BGISEQ-500 sequencer. Gigascience 6, 1-9 (2017).
[1375] 69. Jia, W. et al. SOAPfuse: an algorithm for identifying fusion transcripts from paired-end RNA-Seq data. Genome Biol 14, R12 (2013).
[1376] 70. Ritchie, M. E. et al. limma powers differential expression analyses for RNA-sequencing and microarray studies. Nucleic Acids Res 43, e47 (2015).
[1377] 71. Wu, Y. C. et al. High-throughput immunoglobulin repertoire analysis distinguishes between human IgM memory and switched memory B-cell populations. Blood 116, 1070-1078 (2010).
[1378] 72. Brochet, X., Lefranc, M. P. & Giudicelli, V. IMGT/V-QUEST: the highly customized and integrated system for IG and TR standardized V-J and V-D-J sequence analysis. Nucleic Acids Res 36, W503-8 (2008).

### Example 6

[1379] Mutations in ADAR affecting ADAR activity were screened using yeast screening. The screen was performed in multiple rounds. Each round of screening yielded a set of candidate mutations. The candidate mutations were then validated in mammalian cells. The top-performing mutations were added to the last version of mutations and re-screened. The mutations screened in 10 rounds are shown in the table below and FIG. 92. The mutant identified in round n was designated as “RESCUE vn-1.” As discussed herein RESCUE refer to mutations that convert adenosine deaminase activity to cytidine deaminase activity.

| RESCUE | | Plasmid |
|---|---|---|
| Round | ADAR mutations | number |
| RESCUEv0 | E488Q | pAB0048 |
| RESCUEv1 | E488Q, V351G | pAB0359 |
| RESCUEv2 | E488Q, V351G, S486A | pAB1188 |
| RESCUEv3 | E488Q, V351G, S486A, T375S | pAB0642 |
| RESCUEv4 | E488Q, V351G, S486A, T375S, S370C, | pAB1072 |
| RESCUEv5 | E488Q, V351G, S486A, T375S, S370C, P462A | pAB1135 |
| RESCUEv6 | E488Q, V351G, S486A, T375S, S370C, | pAB1146 |
| | P462A, N5971 | |
| RESCUEv7 | E488Q, V351G, S486A, T375S, S370C, | pAB1194 |
| | P462A, N597I, L3321 | |
| RESCUEv8 | E488Q, V351G, S486A, T375S, S370C, | pAB1220 |
| | P462A, N597I, L3321, I398V | |
| RESCUEv9 | E488Q, V351G, S486A, T375S, S370C, | pAB1327 |
| | P462A, N597I, L3321, I398V, K3501 | |

[1380] Dose responses of the RESCUE mutants were tested on the T motif (FIG. 93) and C and G motifs (FIG. 94). Endogenous targeting with RESCUE v3, v6, v7, and v8 was tested (FIGS. 95 and 96).

[1381] Screening for mutations for RESCUE v9 was performed (FIG. 97). Potential mutations for RESCUEv9 were identified (FIG. 98). Base flip and motif testing were performed (FIG. 99). Effects of RESCUEv9 was tested on different motif flip (FIG. 100). The data suggests v9 worked better with C-flip guides. Comparison between B6 and B12 with RESCUE v1 and v8 were performed with 50 bp guides (FIGS. 101 and 30 bp guides (FIG. 102).

[1382] Various modifications and variations of the described methods, compositions, and kits of the invention will be apparent to those skilled in the art without departing from the scope and spirit of the invention. Although the invention has been described in connection with specific embodiments, it will be understood that it is capable of further modifications and that the invention as claimed should not be unduly limited to such specific embodiments. Indeed, various modifications of the described modes for carrying out the invention that are obvious to those skilled in the art are intended to be within the scope of the invention. This application is intended to cover any variations, uses, or adaptations of the invention following, in general, the principles of the invention and including such departures from the present disclosure come within known customary practice within the art to which the invention pertains and may be applied to the essential features herein before set forth. Other embodiments are set forth in the following claims.

The application's sequence listing, which the Patent Office published only in electronic form, follows.

SEQUENCE LISTING (855 sequences)

SEQ ID NO: 1 - protein, 15 aa, Artificial Sequence
  Synthetic
GGGGSGGGGSGGGGS

SEQ ID NO: 2 - protein, 20 aa, Artificial Sequence
  Synthetic
GGGGSGGGGSGGGGSGGGGS

SEQ ID NO: 3 - protein, 25 aa, Artificial Sequence
  Synthetic
GGGGSGGGGSGGGGSGGGGSGGGGS

SEQ ID NO: 4 - protein, 30 aa, Artificial Sequence
  Synthetic
GGGGSGGGGSGGGGSGGGGSGGGGSGGGGS

SEQ ID NO: 5 - protein, 35 aa, Artificial Sequence
  Synthetic
GGGGSGGGGSGGGGSGGGGSGGGGSGGGGSGGGGS

SEQ ID NO: 6 - protein, 40 aa, Artificial Sequence
  Synthetic
GGGGSGGGGSGGGGSGGGGSGGGGSGGGGSGGGGSGGGGS

SEQ ID NO: 7 - protein, 45 aa, Artificial Sequence
  Synthetic
GGGGSGGGGSGGGGSGGGGSGGGGSGGGGSGGGGSGGGGSGGGGS

SEQ ID NO: 8 - protein, 50 aa, Artificial Sequence
  Synthetic
GGGGSGGGGSGGGGSGGGGSGGGGSGGGGSGGGGSGGGGSGGGGSGGGGS

SEQ ID NO: 9 - protein, 55 aa, Artificial Sequence
  Synthetic
GGGGSGGGGSGGGGSGGGGSGGGGSGGGGSGGGGSGGGGSGGGGSGGGGSGGGGS

SEQ ID NO: 10 - protein, 15 aa, Artificial Sequence
  Synthetic
GSGGSGGSGGSGGSG

SEQ ID NO: 11 - protein, 32 aa, Artificial Sequence
  Synthetic
LEPGEKPYKCPECGKSFSQSGALTRHQRTHTR

SEQ ID NO: 12 - protein, 9 aa, Artificial Sequence
  Synthetic
GGSGGSGGS

SEQ ID NO: 13 - protein, 60 aa, Artificial Sequence
  Synthetic
GGGGSGGGGSGGGGSGGGGSGGGGSGGGGSGGGGSGGGGSGGGGSGGGGSGGGGSGGGGS

SEQ ID NO: 14 - protein, 5 aa, Artificial Sequence
  Synthetic
GGGGS

SEQ ID NO: 15 - protein, 10 aa, Artificial Sequence
  Synthetic
GGGGSGGGGS

SEQ ID NO: 16 - protein, 20 aa, Artificial Sequence
  Synthetic
PKKKRKVEASSPKKRKVEAS

SEQ ID NO: 17 - protein, 7 aa, SV40
PKKKRKV

SEQ ID NO: 18 - protein, 10 aa, Artificial Sequence
  Synthetic
PKKKRKVEAS

SEQ ID NO: 19 - protein, 16 aa, Artificial Sequence
  Synthetic
KRPAATKKAGQAKKKK

SEQ ID NO: 20 - protein, 9 aa, Artificial Sequence
  Synthetic
PAAKRVKLD

SEQ ID NO: 21 - protein, 11 aa, Artificial Sequence
  Synthetic
RQRRNELKRSP

SEQ ID NO: 22 - protein, 38 aa, Artificial Sequence
  Synthetic
NQSSNFGPMKGGNFGGRSSGPYGGGGQYFAKPRNQGGY

SEQ ID NO: 23 - protein, 42 aa, Artificial Sequence
  Synthetic
RMRIZFKNKGKDTAELRRRRVEVSVELRKAKKDEQILKRRNV

SEQ ID NO: 24 - protein, 8 aa, Artificial Sequence
  Synthetic
VSRKRPRP

SEQ ID NO: 25 - protein, 8 aa, Artificial Sequence
  Synthetic
PPKKARED

SEQ ID NO: 26 - protein, 8 aa, Homo sapiens
PQPKKKPL

SEQ ID NO: 27 - protein, 12 aa, Mus
SALIKKKKKMAP

SEQ ID NO: 28 - protein, 5 aa, Influenza virus
DRLRR

SEQ ID NO: 29 - protein, 7 aa, Influenza virus
PKQKKRK

SEQ ID NO: 30 - protein, 10 aa, Hepatitis virus
RKLKKKIKKL

SEQ ID NO: 31 - protein, 10 aa, Mus
REKKKFLKRR

SEQ ID NO: 32 - protein, 20 aa, Homo sapiens
KRKGDEVDGVDEVAKKKSKK

SEQ ID NO: 33 - protein, 17 aa, Homo sapiens
RKCLQAGMNLEARKTKK

SEQ ID NO: 34 - protein, 1340 aa, Lachnospiracea sp
MQISKVNHKHVAVGQKDRERITGFIYNDPVGDEKSLEDVVAKRANDTKVLFNVFNTKDLYDSQESDKSEKDKEIISKGAKFVAKSFNSAITILKKQNKIYSTLTSQQVIKELKDKFGGARIYDDDIEEALTETLKKSFRKENVRNSIKVLIENAAGIRSSLSKDEEELIQEYFVKQLVEEYTKTKLQKNVVKSIKNQNMVIQPDSDSQVLSLSESRREKQSSAVSSDTLVNCKEKDVLKAFLTDYAVLDEDERNSLLWKLRNLVNLYFYGSESIRDYSYTKEKSVWKEHDEQKANKTLFIDEICHITKIGKNGKEQKVLDYEENRSRCRKQNINYYRSALNYAKNNTSGIFENEDSNHFWIHLIENEVERLYNGIENGEEFKFETGYISEKVWKAVINHLSIKYIALGKAVYNYAMKELSSPGDIEPGKIDDSYINGITSFDYEIIKAEESLQRDISMNVVFATNYLACATVDTDKDFLLFSKEDIRSCTKKDGNLCKNIMQFWGGYSTWKNFCEEYLKDDKDALELLYSLKSMLYSMRNSSFHFSTENVDNGSWDTELIGKLFEEDCNRAARIEKEKFYNNNLHMFYSSSLLEKVLERLYSSHHERASQVPSFNRVFVRKNFPSSLSEQRITPKFTDSKDEQIWQSAVYYLCKEIYYNDFLQSKEAYKLFREGVKNLDKNDINNQKAADSFKQAVVYYGKAIGNATLSQVCQAIMTEYNRQNNDGLKKKSAYAEKQNSNKYKHYPLFLKQVLQSAFWEYLDENKEIYGFISAQIHKSNVEIKAEDFIANYSSQQYKKLVDKVKKTPELQKWYTLGRLINPRQANQFLGSIRNYVQFVKDIQRRAKENGNPIRNYYEVLESDSIIKILEMCTKLNGTTSNDIHDYFRDEDEYAEYISQFVNFGDVHSGAALNAFCNSESEGKKNGIYYDGINPIVNRNWVLCKLYGSPDLISKIISRVNENMIHDFHKQEDLIREYQIKGICSNKKEQQDLRTFQVLKNRVELRDIVEYSEIINELYGQLIKWCYLRERDLMYFQLGFHYLCLNNASSKEADYIKINVDDRNISGAILYQIAAMYINGLPVYYKKDDMYVALKSGKKASDELNSNEQTSKKINYFLKYGNNILGDKKDQLYLAGLELFENVAEHENIIIFRNEIDHFHYFYDRDRSMLDLYSEVFDRFFTYDMKLRKNVVNMLYNILLDHNIVSSFVFETGEKKVGRGDSEVIKPSAKIRLRANNGVSSDVFTYKVGSKDELKIATLPAKNEEFLLNVARLIYYPDMEAVSENMVREGVVKVEKSNDKKGKISRGSNTRSSNQSKYNNKSKNRMNYSMGSIFEKMDLKFD

SEQ ID NO: 35 - protein, 1437 aa, Lachnospiracea NK4A179
MKISKVREENRGAKLTVNAKTAVVSENRSQEGILYNDPSRYGKSRKNDEDRDRYIESRLKSSGKLYRIFNEDKNKRETDELQWFLSEIVKKINRRNGLVLSDMLSVDDRAFEKAFEKYAELSYTNRRNKVSGSPAFETCGVDAATAERLKGIISETNFINRIKNNIDNKVSEDIIDRIIAKYLKKSLCRERVKRGLKKLLMNAFDLPYSDPDIDVQRDFIDYVLEDFYHVRAKSQVSRSIKNMNMPVQPEGDGKFAITVSKGGTESGNKRSAEKEAFKKFLSDYASLDERVRDDMLRRMRRLVVLYFYGSDDSKLSDVNEKFDVWEDHAARRVDNREFIKLPLENKLANGKTDKDAERIRKNTVKELYRNQNIGCYRQAVKAVEEDNNGRYFDDKMLNMFFIHRIEYGVEKIYANLKQVTEFKARTGYLSEKIWKDLINYISIKYIAMGKAVYNYAMDELNASDKKEIELGKISEEYLSGISSFDYELIKAEEMLQRETAVYVAFAARHLSSQTVELDSENSDFLLLKPKGTMDKNDKNKLASNNILNFLKDKETLRDTILQYFGGHSLWTDFPFDKYLAGGKDDVDFLTDLKDVIYSMRNDSFHYATENHNNGKWNKELISAMFEHETERMTVVMKDKFYSNNLPMFYKNDDLKKLLIDLYKDNVERASQVPSFNKVFVRKNFPALVRDKDNLGIELDLKADADKGENELKFYNALYYMFKEIYYNAFLNDKNVRERFITKATKVADNYDRNKERNLKDRIKSAGSDEKKKLREQLQNYIAENDFGQRIKNIVQVNPDYTLAQICQLIMTEYNQQNNGCMQKKSAARKDINKDSYQHYKMLLLVNLRKAFLEFIKENYAFVLKPYKHDLCDKADFVPDFAKYVKPYAGLISRVAGSSELQKWYIVSRFLSPAQANHMLGFLHSYKQYVWDIYRRASETGTEINHSIAEDKIAGVDITDVDAVIDLSVKLCGTISSEISDYFKDDEVYAEYISSYLDFEYDGGNYKDSLNRFCNSDAVNDQKVALYYDGEHPKLNRNIILSKLYGERRFLEKITDRVSRSDIVEYYKLKKETSQYQTKGIFDSEDEQKNIKKFQEMKNIVEFRDLMDYSEIADELQGQLINWIYLRERDLMNFQLGYHYACLNNDSNKQATYVTLDYQGKKNRKINGAILYQICAMYINGLPLYYVDKDSSEWTVSDGKESTGAKIGEFYRYAKSFENTSDCYASGLEIFENISEHDNITELRNYIEHFRYYSSFDRSFLGIYSEVFDRFFTYDLKYRKNVPTILYNILLQHFVNVRFEFVSGKKMIGIDKKDRKIAKEKECARITIREKNGVYSEQFTYKLKNGTVYVDARDKRYLQSIIRLLFYPEKVNMDEMIEVKEKKKPSDNNTGKGYSKRDRQQDRKEYDKYKEKKKKEGNFLSGMGGNINWDEINAQLKN

SEQ ID NO: 36 - protein, 1385 aa, Clostridium aminophilum
MKFSKVDHTRSAVGIQKATDSVHGMLYTDPKKQEVNDLDKRFDQLNVKAKRLYNVFNQSKAEEDDDEKRFGKVVKKLNRELKDLLFHREVSRYNSIGNAKYNYYGIKSNPEEIVSNLGMVESLKGERDPQKVISKLLLYYLRKGLKPGTDGLRMILEASCGLRKLSGDEKELKVFLQTLDEDFEKKTFKKNLIRSIENQNMAVQPSNEGDPIIGITQGRFNSQKNEEKSAIERMMSMYADLNEDHREDVLRKLRRLNVLYFNVDTEKTEEPTLPGEVDTNPVFEVWHDHEKGKENDRQFATFAKILTEDRETRKKEKLAVKEALNDLKSAIRDHNIMAYRCSIKVTEQDKDGLFFEDQRINRFWIHHIESAVERILASINPEKLYKLRIGYLGEKVWKDLLNYLSIKYIAVGKAVFHFAMEDLGKTGQDIELGKLSNSVSGGLTSFDYEQIRADETLQRQLSVEVAFAANNLFRAVVGQTGKKIEQSKSEENEEDFLLWKAEKIAESIKKEGEGNTLKSILQFFGGASSWDLNHFCAAYGNESSALGYETKFADDLRKAIYSLRNETFHFTTLNKGSFDWNAKLIGDMFSHEAATGIAVERTRFYSNNLPMFYRESDLKRIMDHLYNTYHPRASQVPSFNSVFVRKNFRLFLSNTLNTNTSFDTEVYQKWESGVYYLFKEIYYNSFLPSGDAHHLFFEGLRRIRKEADNLPIVGKEAKKRNAVQDFGRRCDELKNLSLSAICQMIMTEYNEQNNGNRKVKSTREDKRKPDIFQHYKMLLLRTLQEAFAIYIRREEFKFIFDLPKTLYVMKPVEEFLPNWKSGMFDSLVERVKQSPDLQRWYVLCKFLNGRLLNQLSGVIRSYIQFAGDIQRRAKANHNRLYMDNTQRVEYYSNVLEVVDFCIKGTSRFSNVFSDYFRDEDAYADYLDNYLQFKDEKIAEVSSFAALKTFCNEEEVKAGIYMDGENPVMQRNIVMAKLFGPDEVLKNVVPKVTREEIEEYYQLEKQIAPYRQNGYCKSEEDQKKLLRFQRIKNRVEFQTITEFSEIINELLGQLISWSFLRERDLLYFQLGFHYLCLHNDTEKPAEYKEISREDGTVIRNAILHQVAAMYVGGLPVYTLADKKLAAFEKGEADCKLSISKDTAGAGKKIKDFFRYSKYVLIKDRMLTDQNQKYTIYLAGLELFENTDEHDNITDVRKYVDHFKYYATSDENAMSILDLYSEIHDRFFTYDMKYQKNVANMLENILLRHFVLIRPEFFTGSKKVGEGKKITCKARAQIEIAENGMRSEDFTYKLSDGKKNISTCMIAARDQKYLNTVARLLYYPHEAKKSIVDTREKKNNKKTNRGDGTFNKQKGTARKEKDNGPREFNDTGFSNTPFAGFDPFRNS

SEQ ID NO: 37 - protein, 1175 aa, Carnobacterium gallinarum
MRITKVKIKLDNKLYQVTMQKEEKYGTLKLNEESRKSTAEILRLKKASFNKSFHSKTINSQKENKNATIKKNGDYISQIFEKLVGVDTNKNIRKPKMSLTDLKDLPKKDLALFIKRKFKNDDIVEIKNLDLISLFYNALQKVPGEHFTDESWADFCQEMMPYREYKNKFIERKIILLANSIEQNKGFSINPETFSKRKRVLHQWAIEVQERGDFSILDEKLSKLAEIYNFKKMCKRVQDELNDLEKSMKKGKNPEKEKEAYKKQKNFKIKTIWKDYPYKTHIGLIEKIKENEELNQFNIEIGKYFEHYFPIKKERCTEDEPYYLNSETIATTVNYQLKNALISYLMQIGKYKQFGLENQVLDSKKLQEIGIYEGFQTKFMDACVFATSSLKNIIEPMRSGDILGKREFKEAIATSSFVNYHHFFPYFPFELKGMKDRESELIPFGEQTEAKQMQNIWALRGSVQQIRNEIFHSFDKNQKFNLPQLDKSNFEFDASENSTGKSQSYIETDYKFLFEAEKNQLEQFFIERIKSSGALEYYPLKSLEKLFAKKEMKFSLGSQVVAFAPSYKKLVKKGHSYQTATEGTANYLGLSYYNRYELKEESFQAQYYLLKLIYQYVFLPNFSQGNSPAFRETVKAILRINKDEARKKMKKNKKFLRKYAFEQVREMEFKETPDQYMSYLQSEMREEKVRKAEKNDKGFEKNITMNFEKLLMQIFVKGFDVFLTTFAGKELLLSSEEKVIKETEISLSKKINEREKTLKASIQVEHQLVATNSAISYWLFCKLLDSRHLNELRNEMIKFKQSRIKFNHTQHAELIQNLLPIVELTILSNDYDEKNDSQNVDVSAYFEDKSLYETAPYVQTDDRTRVSFRPILKLEKYHTKSLIEALLKDNPQFRVAATDIQEWMHKREEIGELVEKRKNLHTEWAEGQQTLGAEKREEYRDYCKKIDRFNWKANKVTLTYLSQLHYLITDLLGRMVGFSALFERDLVYFSRSFSELGGETYHISDYKNLSGVLRLNAEVKPIKIKNIKVIDNEENPYKGNEPEVKPFLDRLHAYLENVIGIKAVHGKIRNQTAHLSVLQLELSMIESMNNLRDLMAYDRKLKNAVTKSMIKILDKHGMILKLKIDENHKNFEIESLIPKEIIHLKDKAIKTNQVSEEYCQLVLALLTTNPGNQLN

SEQ ID NO: 38 - protein, 1164 aa, Carnobacterium gallinarum
MRMTKVKINGSPVSMNRSKLNGHLVWNGTTNTVNILTKKEQSFAASFLNKTLVKADQVKGYKVLAENIFIIFEQLEKSNSEKPSVYLNNIRRLKEAGLKRFFKSKYHEEIKYTSEKNQSVPTKLNLIPLFFNAVDRIQEDKFDEKNWSYFCKEMSPYLDYKKSYLNRKKEILANSIQQNRGFSMPTAEEPNLLSKRKQLFQQWAMKFQESPLIQQNNFAVEQFNKEFANKINELAAVYNVDELCTAITEKLMNFDKDKSNKTRNFEIKKLWKQHPHNKDKALIKLFNQEGNEALNQFNIELGKYFEHYFPKTGKKESAESYYLNPQTIIKTVGYQLRNAFVQYLLQVGKLHQYNKGVLDSQTLQEIGMYEGFQTKFMDACVFASSSLRNIIQATTNEDILTREKFKKELEKNVELKHDLFFKTEIVEERDENPAKKIAMTPNELDLWAIRGAVQRVRNQIFHQQINKRHEPNQLKVGSFENGDLGNVSYQKTIYQKLFDAEIKDIEIYFAEKIKSSGALEQYSMKDLEKLFSNKELTLSLGGQVVAFAPSYKKLYKQGYFYQNEKTIELEQFTDYDFSNDVFKANYYLIKLIYHYVFLPQFSQANNKLFKDTVHYVIQQNKELNTTEKDKKNNKKIRKYAFEQVKLMKNESPEKYMQYLQREMQEERTIKEAKKTNEEKPNYNFEKLLIQIFIKGFDTFLRNFDLNLNPAEELVGTVKEKAEGLRKRKERIAKILNVDEQIKTGDEEIAFWIFAKLLDARHLSELRNEMIKFKQSSVKKGLIKNGDLIEQMQPILELCILSNDSESMEKESFDKIEVFLEKVELAKNEPYMQEDKLTPVKFRFMKQLEKYQTRNFIENLVIENPEFKVSEKIVLNWHEEKEKIADLVDKRTKLHEEWASKAREIEEYNEKIKKNKSKKLDKPAEFAKFAEYKIICEAIENFNRLDHKVRLTYLKNLHYLMIDLMGRMVGFSVLFERDFVYMGRSYSALKKQSIYLNDYDTFANIRDWEVNENKHLFGTSSSDLTFQETAEFKNLKKPMENQLKALLGVTNHSFEIRNNIAHLHVLRNDGKGEGVSLLSCMNDLRKLMSYDRKLKNAVTKAIIKILDKHGMILKLTNNDHTKPFEIESLKPKKIIHLEKSNHSFPMDQVSQEYCDLVKKMLVFTN

SEQ ID NO: 39 - protein, 1154 aa, Paludibacter propionicigenes
MRVSKVKVKDGGKDKMVLVHRKTTGAQLVYSGQPVSNETSNILPEKKRQSFDLSTLNKTIIKFDTAKKQKLNVDQYKIVEKIFKYPKQELPKQIKAEEILPFLNHKFQEPVKYWKNGKEESFNLTLLIVEAVQAQDKRKLQPYYDWKTWYIQTKSDLLKKSIENNRIDLTENLSKRKKALLAWETEFTASGSIDLTHYHKVYMTDVLCKMLQDVKPLTDDKGKINTNAYHRGLKKALQNHQPAIFGTREVPNEANRADNQLSIYHLEVVKYLEHYFPIKTSKRRNTADDIAHYLKAQTLKTTIEKQLVNAIRANIIQQGKTNHHELKADTTSNDLIRIKTNEAFVLNLTGTCAFAANNIRNMVDNEQTNDILGKGDFIKSLLKDNTNSQLYSFFFGEGLSTNKAEKETQLWGIRGAVQQIRNNVNHYKKDALKTVFNISNFENPTITDPKQQTNYADTIYKARFINELEKIPEAFAQQLKTGGAVSYYTIENLKSLLTTFQFSLCRSTIPFAPGFKKVFNGGINYQNAKQDESFYELMLEQYLRKENFAEESYNARYFMLKLIYNNLFLPGFTTDRKAFADSVGFVQMQNKKQAEKVNPRKKEAYAFEAVRPMTAADSIADYMAYVQSELMQEQNKKEEKVAEETRINFEKFVLQVFIKGFDSFLRAKEFDFVQMPQPQLTATASNQQKADKLNQLEASITADCKLTPQYAKADDATHIAFYVFCKLLDAAHLSNLRNELIKFRESVNEFKFHHLLEIIEICLLSADVVPTDYRDLYSSEADCLARLRPFIEQGADITNWSDLFVQSDKHSPVIHANIELSVKYGTTKLLEQIINKDTQFKTTEANFTAWNTAQKSIEQLIKQREDHHEQWVKAKNADDKEKQERKREKSNFAQKFIEKHGDDYLDICDYINTYNWLDNKMHFVHLNRLHGLTIELLGRMAGFVALFDRDFQFFDEQQIADEFKLHGFVNLHSIDKKLNEVPTKKIKEIYDIRNKIIQINGNKINESVRANLIQFISSKRNYYNNAFLHVSNDEIKEKQMYDIRNHIAHFNYLTKDAADFSLIDLINELRELLHYDRKLKNAVSKAFIDLFDKHGMILKLKLNADHKLKVESLEPKKIYHLGSSAKDKPEYQYCTNQVMMAYCNMCRSLLEMKK

SEQ ID NO: 40 - protein, 970 aa, Listeria weihenstephanensis
MLALLHQEVPSQKLHNLKSLNTESLTKLFKPKFQNMISYPPSKGAEHVQFCLTDIAVPAIRDLDEIKPDWGIFFEKLKPYTDWAESYIHYKQTTIQKSIEQNKIQSPDSPRKLVLQKYVTAFLNGEPLGLDLVAKKYKLADLAESFKVVDLNEDKSANYKIKACLQQHQRNILDELKEDPELNQYGIEVKKYIQRYFPIKRAPNRSKHARADFLKKELIESTVEQQFKNAVYHYVLEQGKMEAYELTDPKTKDLQDIRSGEAFSFKFINACAFASNNLKMILNPECEKDILGKGDFKKNLPNSTTQSDVVKKMIPFFSDEIQNVNFDEAIWAIRGSIQQIRNEVYHCKKHSWKSILKIKGFEFEPNNMKYTDSDMQKLMDKDIAKIPDFIEEKLKSSGIIRFYSHDKLQSIWEMKQGFSLLTTNAPFVPSFKRVYAKGHDYQTSKNRYYDLGLTTFDILEYGEEDFRARYFLTKLVYYQQFMPWFTADNNAFRDAANFVLRLNKNRQQDAKAFINIREVEEGEMPRDYMGYVQGQIAIHEDSTEDTPNHFEKFISQVFIKGFDSHMRSADLKFIKNPRNQGLEQSEIEEMSFDIKVEPSFLKNKDDYIAFWTFCKMLDARHLSELRNEMIKYDGHLTGEQEIIGLALLGVDSRENDWKQFFSSEREYEKIMKGYVGEELYQREPYRQSDGKTPILFRGVEQARKYGTETVIQRLFDASPEFKVSKCNITEWERQKETIEETIERRKELHNEWEKNPKKPQNNAFFKEYKECCDAIDAYNWHKNKTTLVYVNELHHLLIEILGRYVGYVAIADRDFQCMANQYFKHSGITERVEYWGDNRLKSIKKLDTFLKKEGLFVSEKNARNHIAHLNYLSLKSECTLLYLSERLREIFKYDRKLKNAVSKSLIDILDRHGMSVVFANLKENKHRLVIKSLEPKKLRHLGEKKIDNGYIETNQVSEEYCGIVKRLLEI

SEQ ID NO: 41 - protein, 1051 aa, Listeriacea bacterium
MKITKMRVDGRTIVMERTSKEGQLGYEGIDGNKTTEIIFDKKKESFYKSILNKTVRKPDEKEKNRRKQAINKAINKEITELMLAVLHQEVPSQKLHNLKSLNTESLTKLFKPKFQNMISYPPSKGAEHVQFCLTDIAVPAIRDLDEIKPDWGIFFEKLKPYTDWAESYIHYKQTTIQKSIEQNKIQSPDSPRKLVLQKYVTAFLNGEPLGLDLVAKKYKLADLAESFKLVDLNEDKSANYKIKACLQQHQRNILDELKEDPELNQYGIEVKKYIQRYFPIKRAPNRSKHARADFLKKELIESTVEQQFKNAVYHYVLEQGKMEAYELTDPKTKDLQDIRSGEAFSFKFINACAFASNNLKMILNPECEKDILGKGNFKKNLPNSTTRSDVVKKMIPFFSDELQNVNFDEAIWAIRGSIQQIRNEVYHCKKHSWKSILKIKGFEFEPNNMKYADSDMQKLMDKDIAKIPEFIEEKLKSSGVVRFYRHDELQSIWEMKQGFSLLTTNAPFVPSFKRVYAKGHDYQTSKNRYYNLDLTTFDILEYGEEDFRARYFLTKLVYYQQFMPWFTADNNAFRDAANFVLRLNKNRQQDAKAFINIREVEEGEMPRDYMGYVQGQIAIHEDSIEDTPNHFEKFISQVFIKGFDRHMRSANLKFIKNPRNQGLEQSEIEEMSFDIKVEPSFLKNKDDYIAFWIFCKMLDARHLSELRNEMIKYDGHLTGEQEIIGLALLGVDSRENDWKQFFSSEREYEKIMKGYVVEELYQREPYRQSDGKTPILFRGVEQARKYGTETVIQRLFDANPEFKVSKCNLAEWERQKETIEETIKRRKELHNEWAKNPKKPQNNAFFKEYKECCDAIDAYNWHKNKTTLAYVNELHHLLIEILGRYVGYVAIADRDFQCMANQYFKHSGITERVEYWGDNRLKSIKKLDTFLKKEGLFVSEKNARNHIAHLNYLSLKSECTLLYLSERLREIFKYDRKLKNAVSKSLIDILDRHGMSVVFANLKENKHRLVIKSLEPKKLRHLGGKKIDGGYIETNQVSEEYCGIVKRLLEM

SEQ ID NO: 42 - protein, 1152 aa, Leptotrichia wadei
MKVTKVDGISHKKYIEEGKLVKSTSEENRTSERLSELLSIRLDIYIKNPDNASEEENRIRRENLKKFFSNKVLHLKDSVLYLKNRKEKNAVQDKNYSEEDISEYDLKNKNSFSVLKKILLNEDVNSEELEIFRKDVEAKLNKINSLKYSFEENKANYQKINENNVEKVGGKSKRNIIYDYYRESAKRNDYINNVQEAFDKLYKKEDIEKLFFLIENSKKHEKYKIREYYHKIIGRKNDKENFAKIIYEEIQNVNNIKELIEKIPDMSELKKSQVFYKYYLDKEELNDKNIKYAFCHFVEIEMSQLLKNYVYKRLSNISNDKIKRIFEYQNLKKLIENKLLNKLDTYVRNCGKYNYYLQVGEIATSDFIARNRQNEAFLRNIIGVSSVAYFSLRNILETENENDITGRMRGKTVKNNKGEEKYVSGEVDKIYNENKQNEVKENLKMFYSYDFNMDNKNEIEDFFANIDEAISSIRHGIVHFNLELEGKDIFAFKNIAPSEISKKMFQNEINEKKLKLKIFKQLNSANVFNYYEKDVIIKYLKNTKFNFVNKNIPFVPSFTKLYNKIEDLRNTLKFFWSVPKDKEEKDAQIYLLKNIYYGEFLNKFVKNSKVFFKITNEVIKINKQRNQKTGHYKYQKFENIEKTVPVEYLAIIQSREMINNQDKEEKNTYIDFIQQIFLKGFIDYLNKNNLKYIESNNNNDNNDIFSKIKIKKDNKEKYDKILKNYEKHNRNKEIPHEINEFVREIKLGKILKYTENLNMFYLILKLLNHKELTNLKGSLEKYQSANKEETFSDELELINLLNLDNNRVTEDFELEANEIGKFLDFNENKIKDRKELKKFDTNKIYFDGENIIKHRAFYNIKKYGMLNLLEKIADKAKYKISLKELKEYSNKKNEIEKNYTMQQNLHRKYARPKKDEKFNDEDYKEYEKAIGNIQKYTHLKNKVEFNELNLLQGLLLKILHRLVGYTSIWERDLRFRLKGEFPENHYIEEIFNFDNSKNVKYKSGQIVEKYINFYKELYKDNVEKRSIYSDKKVKKLKQEKKDLYIRNYIAHFNYIPHAEISLLEVLENLRKLLSYDRKLKNAIMKSIVDILKEYGFVATFKIGADKKIEIQTLESEKIVHLKNLKKKKLMTDRNSEELCELVKVMFEYKALE

SEQ ID NO: 43 - protein, 1285 aa, Rhodobacter capsulatus
MQIGKVQGRTISEFGDPAGGLKRKISTDGKNRKELPAHLSSDPKALIGQWISGIDKIYRKPDSRKSDGKAIHSPTPSKMQFDARDDLGEAFWKLVSEAGLAQDSDYDQFKRRLHPYGDKFQPADSGAKLKFEADPPEPQAFHGRWYGAMSKRGNDAKELAAALYEHLHVDEKRIDGQPKRNPKTDKFAPGLVVARALGIESSVLPRGMARLARNWGEEEIQTYFVVDVAASVKEVAKAAVSAAQAFDPPRQVSGRSLSPKVGFALAEHLERVTGSKRCSFDPAAGPSVLALHDEVKKTYKRLCARGKNAARAFPADKTELLALMRHTHENRVRNQMVRMGRVSEYRGQQAGDLAQSHYWTSAGQTEIKESEIFVRLWVGAFALAGRSMKAWIDPMGKIVNTEKNDRDLTAAVNIRQVISNKEMVAEAMARRGIYFGETPELDRLGAEGNEGFVFALLRYLRGCRNQTFHLGARAGFLKEIRKELEKTRWGKAKEAEHVVLTDKTVAAIRAIIDNDAKALGARLLADLSGAFVAHYASKEHFSTLYSEIVKAVKDAPEVSSGLPRLKLLLKRADGVRGYVHGLRDTRKHAFATKLPPPPAPRELDDPATKARYIALLRLYDGPFRAYASGITGTALAGPAARAKEAATALAQSVNVTKAYSDVMEGRTSRLRPPNDGETLREYLSALTGETATEFRVQIGYESDSENARKQAEFIENYRRDMLAFMFEDYIRAKGFDWILKIEPGATAMTRAPVLPEPIDTRGQYEHWQAALYLVMHFVPASDVSNLLHQLRKWEALQGKYELVQDGDATDQADARREALDLVKRFRDVLVLFLKTGEARFEGRAAPFDLKPFRALFANPATFDRLFMATPTTARPAEDDPEGDGASEPELRVARTLRGLRQIARYNHMAVLSDLFAKHKVRDEEVARLAEIEDETQEKSQIVAAQELRTDLHDKVMKCHPKTISPEERQSYAAAIKTIEEHRFLVGRVYLGDHLRLHRLMMDVIGRLIDYAGAYERDTGTFLINASKQLGAGADWAVTIAGAANTDARTQTRKDLAHFNVLDRADGTPDLTALVNRAREMMAYDRKRKNAVPRSILDMLARLGLTLKWQMKDHLLQDATITQAAIKHLDKVRLTVGGPAAVTEARFSQDYLQMVAAVFNGSVQNPKPRRRDDGDAWHKPPKPATAQSQPDQKPPNKAPSAGSRLPPPQVGEVYEGVVVKVIDTGSLGFLAVEGVAGNIGLHISRLRRIREDAIIVGRRYRFRVEIYVPPKSNTSKLNAADLVRID

SEQ ID NO: 44 - protein, 1285 aa, Rhodobacter capsulatus
MQIGKVQGRTISEFGDPAGGLKRKISTDGKNRKELPAHLSSDPKALIGQWISGIDKIYRKPDSRKSDGKAIHSPTPSKMQFDARDDLGEAFWKLVSEAGLAQDSDYDQFKRRLHPYGDKFQPADSGAKLKFEADPPEPQAFHGRWYGAMSKRGNDAKELAAALYEHLHVDEKRIDGQPKRNPKTDKFAPGLVVARALGIESSVLPRGMARLARNWGEEEIQTYFVVDVAASVKEVAKAAVSAAQAFDPPRQVSGRSLSPKVGFALAEHLERVTGSKRCSFDPAAGPSVLALHDEVKKTYKRLCARGKNAARAFPADKTELLALMRHTHENRVRNQMVRMGRVSEYRGQQAGDLAQSHYWTSAGQTEIKESEIFVRLWVGAFALAGRSMKAWIDPMGKIVNTEKNDRDLTAAVNIRQVISNKEMVAEAMARRGIYFGETPELDRLGAEGNEGFVFALLRYLRGCRNQTFHLGARAGFLKEIRKELEKTRWGKAKEAEHVVLTDKTVAAIRAIIDNDAKALGARLLADLSGAFVAHYASKEHFSTLYSEIVKAVKDAPEVSSGLPRLKLLLKRADGVRGYVHGLRDTRKHAFATKLPPPPAPRELDDPATKARYIALLRLYDGPFRAYASGITGTALAGPAARAKEAATALAQSVNVTKAYSDVMEGRSSRLRPPNDGETLREYLSALTGETATEFRVQIGYESDSENARKQAEFIENYRRDMLAFMFEDYIRAKGFDWILKIEPGATAMTRAPVLPEPIDTRGQYEHWQAALYLVMHFVPASDVSNLLHQLRKWEALQGKYELVQDGDATDQADARREALDLVKRFRDVLVLFLKTGEARFEGRAAPFDLKPFRALFANPATFDRLFMATPTTARPAEDDPEGDGASEPELRVARTLRGLRQIARYNHMAVLSDLFAKHKVRDEEVARLAEIEDETQEKSQIVAAQELRTDLHDKVMKCHPKTISPEERQSYAAAIKTIEEHRFLVGRVYLGDHLRLHRLMMDVIGRLIDYAGAYERDTGTFLINASKQLGAGADWAVTIAGAANTDARTQTRKDLAHFNVLDRADGTPDLTALVNRAREMMAYDRKRKNAVPRSILDMLARLGLTLKWQMKDHLLQDATITQAAIKHLDKVRLTVGGPAAVTEARFSQDYLQMVAAVFNGSVQNPKPRRRDDGDAWHKPPKPATAQSQPDQKPPNKAPSAGSRLPPPQVGEVYEGVVVKVIDTGSLGFLAVEGVAGNIGLHISRLRRIREDAIIVGRRYRFRVEIYVPPKSNTSKLNAADLVRID

SEQ ID NO: 45 - protein, 1285 aa, Rhodobacter capsulatus; identical to SEQ ID NO: 44

SEQ ID NO: 46 - protein, 1389 aa, Rhodobacter capsulatus
MGNLFGHKRWYEVRDKKDFKIKRKVKVKRNYDGNKYILNINENNNKEKIDNNKFIRKYINYKKNDNILKEFTRKFHAGNILFKLKGKEGIIRIENNDDFLETEEVVLYIEAYGKSEKLKALGITKKKIIDEAIRQGITKDDKKIEIKRQENEEEIEIDIRDEYTNKTLNDCSIILRIIENDELETKKSIYEIFKNINMSLYKIIEKIIENETEKVFENRYYEEHLREKLLKDDKIDVILTNFMEIREKIKSNLEILGFVKFYLNVGGDKKKSKNKKMLVEKILNINVDLTVEDIADFVIKELEFWNITKRIEKVKKVNNEFLEKRRNRTYIKSYVLLDKHEKFKIERENKKDKIVKFFVENIKNNSIKEKIEKILAEFKIDELIKKLEKELKKGNCDTEIFGIFKKHYKVNFDSKKFSKKSDEEKELYKIIYRYLKGRIEKILVNEQKVRLKKMEKIEIEKILNESILSEKILKRVKQYTLEHIMYLGKLRHNDIDMTTVNTDDFSRLHAKEELDLELITFFASTNMELNKIFSRENINNDENIDFFGGDREKNYVLDKKILNSKIKIIRDLDFIDNKNNITNNFIRKFTKIGTNERNRILHAISKERDLQGTQDDYNKVINIIQNLKISDEEVSKALNLDVVFKDKKNIITKINDIKISEENNNDIKYLPSFSKVLPEILNLYRNNPKNEPFDTIETEKIVLNALIYVNKELYKKLILEDDLEENESKNIFLQELKKTLGNIDEIDENIIENYYKNAQISASKGNNKAIKKYQKKVIECYIGYLRKNYEELFDFSDFKMNIQEIKKQIKDINDNKTYERITVKTSDKTIVINDDFEYIISIFALLNSNAVINKIRNRFFATSVWLNTSEYQNIIDILDEIMQLNTLRNECITENWNLNLEEFIQKMKEIEKDFDDFKIQTKKEIFNNYYEDIKNNILTEFKDDINGCDVLEKKLEKIVIFDDETKFEIDKKSNILQDEQRKLSNINKKDLKKKVDQYIKDKDQEIKSKILCRIIFNSDFLKKYKKEIDNLIEDMESENENKFQEIYYPKERKNELYIYKKNLFLNIGNPNFDKIYGLISNDIKMADAKFLFNIDGKNIRKNKISEIDAILKNLNDKLNGYSKEYKEKYIKKLKENDDFFAKNIQNKNYKSFEKDYNRVSEYKKIRDLVEFNYLNKIESYLIDINWKLAIQMARFERDMHYIVNGLRELGIIKLSGYNTGISRAYPKRNGSDGFYTTTAYYKFFDEESYKKFEKICYGFGIDLSENSEINKPENESIRNYISHFYIVRNPFADYSIAEQIDRVSNLLSYSTRYNNSTYASVFEVFKKDVNLDYDELKKKFKLIGNNDILERLMKPKKVSVLELESYNSDYIKNLIIELLTKIENTNDTL

SEQ ID NO: 47 - protein, 1197 aa, L. wadei
MKVTKVDGISHKKYIEEGKLVKSTSEENRTSERLSELLSIRLDIYIKNPDNASEEENRIRRENLKKFFSNKVLHLKDSVLYLKNRKEKNAVQDKNYSEEDISEYDLKNKNSFSVLKKILLNEDVNSEELEIFRKDVEAKLNKINSLKYSFEENKANYQKINENNVEKVGGKSKRNIIYDYYRESAKRNDYINNVQEAFDKLYKKEDIEKLFFLIENSKKHEKYKIREYYHKIIGRKNDKENFAKIIYEEIQNVNNIKELIEKIPDMSELKKSQVFYKYYLDKEELNDKNIKYAFCHFVEIEMSQLLKNYVYKRLSNISNDKIKRIFEYQNLKKLIENKLLNKLDTYVRNCGKYNYYLQVGEIATSDFIARNRQNEAFLRNIIGVSSVAYFSLRNILETENENDITGRMRGKTVKNNKGEEKYVSGEVDKIYNENKQNEVKENLKMFYSYDFNMDNKNEIEDFFANIDEAISSIRHGIVHFNLELEGKDIFAFKNIAPSEISKKMFQNEINEKKLKLKIFKQLNSANVFNYYEKDVIIKYLKNTKFNFVNKNIPFVPSFTKLYNKIEDLRNTLKFFWSVPKDKEEKDAQIYLLKNIYYGEFLNKFVKNSKVFFKITNEVIKINKQRNQKTGHYKYQKFENIEKTVPVEYLAIIQSREMINNQDKEEKNTYIDFIQQIFLKGFIDYLNKNNLKYIESNNNNDNNDIFSKIKIKKDNKEKYDKILKNYEKHNRNKEIPHEINEFVREIKLGKILKYTENLNMFYLILKLLNHKELTNLKGSLEKYQSANKEETFSDELELINLLNLDNNRVTEDFELEANEIGKFLDFNENKIKDRKELKKFDTNKIYFDGENIIKHRAFYNIKKYGMLNLLEKIADKAKYKISLKELKEYSNKKNEIEKNYTMQQNLHRKYARPKKDEKFNDEDYKEYEKAIGNIQKYTHLKNKVEFNELNLLQGLLLKILHRLVGYTSIWERDLRFRLKGEFPENHYIEEIFNFDNSKNVKYKSGQIVEKYINFYKELYKDNVEKRSIYSDKKVKKLKQEKKDLYIRNYIAHFNYIPHAEISLLEVLENLRKLLSYDRKLKNAIMKSIVDILKEYGFVATFKIGADKKIEIQTLESEKIVHLKNLKKKKLMTDRNSEELCELVKVMFEYKALEKRPAATKKAGQAKKKKGSYPYDVPDYAYPYDVPDYAYPYDVPDYA

SEQ ID NO: 48 - protein, 1120 aa, Listeria seeligeri
MWISIKTLIHHLGVLFFCDYMYNRREKKIIEVKTMRITKVEVDRKKVLISRDKNGGKLVYENEMQDNTEQIMHHKKSSFYKSVVNKTICRPEQKQMKKLVHGLLQENSQEKIKVSDVTKLNISNFLNHRFKKSLYYFPENSPDKSEEYRIEINLSQLLEDSLKKQQGTFICWESFSKDMELYINWAENYISSKTKLIKKSIRNNRIQSTESRSGQLMDRYMKDILNKNKPFDIQSVSEKYQLEKLTSALKATFKEAKKNDKEINYKLKSTLQNHERQIIEELKENSELNQFNIEIRKHLETYFPIKKTNRKVGDIRNLEIGEIQKIVNHRLKNKIVQRILQEGKLASYEIESTVNSNSLQKIKIEEAFALKFINACLFASNNLRNMVYPVCKKDILMIGEFKNSFKEIKHKKFIRQWSQFFSQEITVDDIELASWGLRGAIAPIRNEIIHLKKHSWKKFFNNPTFKVKKSKIINGKTKDVTSEFLYKETLFKDYFYSELDSVPELIINKMESSKILDYYSSDQLNQVFTIPNFELSLLTSAVPFAPSFKRVYLKGFDYQNQDEAQPDYNLKLNIYNEKAFNSEAFQAQYSLFKMVYYQVFLPQFTTNNDLFKSSVDFILTLNKERKGYAKAFQDIRKMNKDEKPSEYMSYIQSQLMLYQKKQEEKEKINHFEKFINQVFIKGFNSFIEKNRLTYICHPTKNTVPENDNIEIPFHTDMDDSNIAFWLMCKLLDAKQLSELRNEMIKFSCSLQSTEEISTFTKAREVIGLALLNGEKGCNDWKELFDDKEAWKKNMSLYVSEELLQSLPYTQEDGQTPVINRSIDLVKKYGTETILEKLFSSSDDYKVSAKDIAKLHEYDVTEKIAQQESLHKQWIEKPGLARDSAWTKKYQNVINDISNYQWAKTKVELTQVRHLHQLTIDLLSRLAGYMSIADRDFQFSSNYILERENSEYRVTSWILLSENKNKNKYNDYELYNLKNASIKVSSKNDPQLKVDLKQLRLTLEYLELFDNRLKEKRNNISHFNYLNGQLGNSILELFDDARDVLSYDRKLKNAVSKSLKEILSSHGMEVTFKPLYQTNHHLKIDKLQPKKIHHLGEKSTVSSNQVSNEYCQLVRTLLTMK

SEQ ID NO: 49 - protein, 1159 aa, Leptotrichia buccalis
MKVTKVGGISHKKYTSEGRLVKSESEENRTDERLSALLNMRLDMYIKNPSSTETKENQKRIGKLKKFFSNKMVYLKDNTLSLKNGKKENIDREYSETDILESDVRDKKNFAVLKKIYLNENVNSEELEVFRNDIKKKLNKINSLKYSFEKNKANYQKINENNIEKVEGKSKRNIIYDYYRESAKRDAYVSNVKEAFDKLYKEEDIAKLVLEIENLTKLEKYKIREFYHEIIGRKNDKENFAKIIYEEIQNVNNMKELIEKVPDMSELKKSQVFYKYYLDKEELNDKNIKYAFCHFVEIEMSQLLKNYVYKRLSNISNDKIKRIFEYQNLKKLIENKLLNKLDTYVRNCGKYNYYLQDGEIATSDFIARNRQNEAFLRNIIGVSSVAYFSLRNILETENENDITGRMRGKTVKNNKGEEKYVSGEVDKIYNENKKNEVKENLKMFYSYDFNMDNKNEIEDFFANIDEAISSIRHGIVHFNLELEGKDIFAFKNIAPSEISKKMFQNEINEKKLKLKIFRQLNSANVFRYLEKYKILNYLKRTRFEFVNKNIPFVPSFTKLYSRIDDLKNSLGIYWKTPKTNDDNKTKEIIDAQIYLLKNIYYGEFLNYFMSNNGNFFEISKEIIELNKNDKRNLKTGFYKLQKFEDIQEKIPKEYLANIQSLYMINAGNQDEEEKDTYIDFIQKIFLKGFMTYLANNGRLSLIYIGSDEETNTSLAEKKQEFDKFLKKYEQNNNIKIPYEINEFLREIKLGNILKYTERLNMFYLILKLLNHKELTNLKGSLEKYQSANKEEAFSDQLELINLLNLDNNRVTEDFELEADEIGKFLDFNGNKVKDNKELKKFDTNKIYFDGENIIKHRAFYNIKKYGMLNLLEKIADKAGYKISIEELKKYSNKKNEIEKNHKMQENLHRKYARPRKDEKFTDEDYESYKQAIENIEEYTHLKNKVEFNELNLLQGLLLRILHRLVGYTSIWERDLRFRLKGEFPENQYIEEIFNFENKKNVKYKGGQIVEKYIKFYKELHQNDEVKINKYSSANIKVLKQEKKDLYIRNYIAHFNYIPHAEISLLEVLENLRKLLSYDRKLKNAVMKSVVDILKEYGFVATFKIGADKKIGIQTLESEKIVHLKNLKKKKLMTDRNSEELCKLVKIMFEYKMEEKKSEN

SEQ ID NO: 50 - protein, 1285 aa, Herbinix hemicellulosilytica
MKLTRRRISGNSVDQKITAAFYRDMSQGLLYYDSEDNDCTDKVIESMDFERSWRGRILKNGEDDKNPFYMFVKGLVGSNDKIVCEPIDVDSDPDNLDILINKNLTGFGRNLKAPDSNDTLENLIRKIQAGIPEEEVLPELKKIKEMIQKDIVNRKEQLLKSIKNNRIPFSLEGSKLVPSTKKMKWLFKLIDVPNKTFNEKMLEKYWEIYDYDKLKANITNRLDKTDKKARSISRAVSEELREYHKNLRTNYNRFVSGDRPAAGLDNGGSAKYNPDKEEFLLFLKEVEQYFKKYFPVKSKHSNKSKDKSLVDKYKNYCSYKVVKKEVNRSIINQLVAGLIQQGKLLYYFYYNDTWQEDFLNSYGLSYIQVEEAFKKSVMTSLSWGINRLTSFFIDDSNTVKFDDITTKKAKEAIESNYFNKLRTCSRMQDHFKEKLAFFYPVYVKDKKDRPDDDIENLIVLVKNAIESVSYLRNRTFHFKESSLLELLKELDDKNSGQNKIDYSVAAEFIKRDIENLYDVFREQIRSLGIAEYYKADMISDCFKTCGLEFALYSPKNSLMPAFKNVYKRGANLNKAYIRDKGPKETGDQGQNSYKALEEYRELTWYIEVKNNDQSYNAYKNLLQLIYYHAFLPEVRENEALITDFINRTKEWNRKETEERLNTKNNKKHKNFDENDDITVNTYRYESIPDYQGESLDDYLKVLQRKQMARAKEVNEKEEGNNNYIQFIRDVVVWAFGAYLENKLKNYKNELQPPLSKENIGLNDTLKELFPEEKVKSPFNIKCRFSISTFIDNKGKSTDNTSAEAVKTDGKEDEKDKKNIKRKDLLCFYLFLRLLDENEICKLQHQFIKYRCSLKERRFPGNRTKLEKETELLAELEELMELVRFTMPSIPEISAKAESGYDTMIKKYFKDFIEKKVFKNPKTSNLYYHSDSKTPVTRKYMALLMRSAPLHLYKDIFKGYYLITKKECLEYIKLSNIIKDYQNSLNELHEQLERIKLKSEKQNGKDSLYLDKKDFYKVKEYVENLEQVARYKHLQHKINFESLYRIFRIHVDIAARMVGYTQDWERDMHFLFKALVYNGVLEERRFEAIFNNNDDNNDGRIVKKIQNNLNNKNRELVSMLCWNKKLNKNEFGAIIWKRNPIAHLNHFTQTEQNSKSSLESLINSLRILLAYDRKRQNAVTKTINDLLLNDYHIRIKWEGRVDEGQIYFNIKEKEDIENEPIIHLKHLHKKDCYIYKNSYMFDKQKEWICNGIKEEVYDKSILKCIGNLFKFDYEDKNKSSANPKHT

SEQ ID NO: 51 - protein, 1344 aa, Eubacterium rectale
MLRRDKEVKKLYNVFNQIQVGTKPKKWNNDEKLSPEENERRAQQKNIKMKNYKWREACSKYVESSQRIINDVIFYSYRKAKNKLRYMRKNEDILKKMQEAEKLSKFSGGKLEDFVAYTLRKSLVVSKYDTQEFDSLAAMVVFLECIGKNNISDHEREIVCKLLELIRKDFSKLDPNVKGSQGANIVRSVRNQNMIVQPQGDRFLFPQVYAKENETVTNKNVEKEGLNEFLLNYANLDDEKRAESLRKLRRILDVYFSAPNHYEKDMDITLSDNIEKEKFNVWEKHECGKKETGLFVDIPDVLMEAEAENIKLDAVVEKRERKVLNDRVRKQNIICYRYTRAVVEKYNSNEPLFFENNAINQYWIHHIENAVERILKNCKAGKLFKLRKGYLAEKVWKDAINLISIKYIALGKAVYNFALDDIWKDKKNKELGIVDERIRNGITSFDYEMIKAHENLQRELAVDIAFSVNNLARAVCDMSNLGNKESDFLLWKRNDIADKLKNKDDMASVSAVLQFFGGKSSWDINIFKDAYKGKKKYNYEVRFIDDLRKAIYCARNENFHFKTALVNDEKWNTELFGKIFERETEFCLNVEKDRFYSNNLYMFYQVSELRNMLDHLYSRSVSRAAQVPSYNSVIVRTAFPEYITNVLGYQKPSYDADTLGKWYSACYYLLKEIYYNSFLQSDRALQLFEKSVKTLSWDDKKQQRAVDNFKDHFSDIKSACTSLAQVCQIYMTEYNQQNNQIKKVRSSNDSIFDQPVYQHYKVLLKKAIANAFADYLKNNKDLFGFIGKPFKANEIREIDKEQFLPDWTSRKYEALCIEVSGSQELQKWYIVGKFLNARSLNLMVGSMRSYIQYVTDIKRRAASIGNELHVSVHDVEKVEKWVQVIEVCSLLASRTSNQFEDYFNDKDDYARYLKSYVDFSNVDMPSEYSALVDFSNEEQSDLYVDPKNPKVNRNIVHSKLFAADHILRDIVEPVSKDNIEEFYSQKAEIAYCKIKGKEITAEEQKAVLKYQKLKNRVELRDIVEYGEIINELLGQLINWSFMRERDLLYFQLGFHYDCLRNDSKKPEGYKNIKVDENSIKDAILYQIIGMYVNGVTVYAPEKDGDKLKEQCVKGGVGVKVSAFHRYSKYLGLNEKTLYNAGLEIFEVVAEHEDIINLRNGIDHFKYYLGDYRSMLSIYSEVFDRFFTYDIKYQKNVLNLLQNILLRHNVIVEPILESGFKTIGEQTKPGAKLSIRSIKSDTFQYKVKGGTLITDAKDERYLETIRKILYYAENEEDNLKKSVVVTNADKYEKNKESDDQNKQKEKKNKDNKGKKNEETKSDAEKNNNERLSYNPFANLNFKLSN

SEQ ID NO: 52 - protein, 1373 aa, Eubacteriacea bacterium
MKISKESHKRTAVAVMEDRVGGVVYVPGGSGIDLSNNLKKRSMDTKSLYNVFNQIQAGTAPSEYEWKDYLSEAENKKREAQKMIQKANYELRRECEDYAKKANLAVSRIIFSKKPKKIFSDDDIISHMKKQRLSKFKGRMEDFVLIALRKSLVVSTYNQEVFDSRKAATVFLKNIGKKNISADDERQIKQLMALIREDYDKWNPDKDSSDKKESSGTKVIRSIEHQNMVIQPEKNKLSLSKISNVGKKTKTKQKEKAGLDAFLKEYAQIDENSRMEYLKKLRRLLDTYFAAPSSYIKGAAVSLPENINFSSELNVWERHEAAKKVNINFVEIPESLLNAEQNNNKINKVEQEHSLEQLRTDIRRRNITCYHFANALAADERYHTLFFENMAMNQFWIHHMENAVERILKKCNVGTLFKLRIGYLSEKVWKDMLNLLSIKYIALGKAVYHFALDDIWKADIWKDASDKNSGKINDLTLKGISSFDYEMVKAQEDLQREMAVGVAFSTNNLARVTCKMDDLSDAESDFLLWNKEAIRRHVKYTEKGEILSAILQFFGGRSLWDESLFEKAYSDSNYELKFLDDLKRAIYAARNETFHFKTAAIDGGSWNTRLFGSLFEKEAGLCLNVEKNKFYSNNLVLFYKQEDLRVFLDKLYGKECSRAAQIPSYNTILPRKSFSDFMKQLLGLKEPVYGSAILDQWYSACYYLFKEVYYNLFLQDSSAKALFEKAVKALKGADKKQEKAVESFRKRYWEISKNASLAEICQSYITEYNQQNNKERKVRSANDGMFNEPIYQHYKMLLKEALKMAFASYIKNDKELKFVYKPTEKLFEVSQDNFLPNWNSEKYNTLISEVKNSPDLQKWYIVGKFMNARMLNLLLGSMRSYLQYVSDIQKRAAGLGENQLHLSAENVGQVKKWIQVLEVCLLLSVRISDKFTDYFKDEEEYASYLKEYVDFEDSAMPSDYSALLAFSNEGKIDLYVDASNPKVNRNIIQAKLYAPDMVLKKVVKKISQDECKEFNEKKEQIMQFKNKGDEVSWEEQQKILEYQKLKNRVELRDLSEYGELINELLGQLINWSYLRERDLLYFQLGFHYSCLMNESKKPDAYKTIRRGTVSIENAVLYQIIAMYINGFPVYAPEKGELKPQCKTGSAGQKIRAFCQWASMVEKKKYELYNAGLELFEVVKEHDNIIDLRNKIDHFKYYQGNDSILALYGEIFDRFFTYDMKYRNNVLNHLQNILLRHNVIIKPIISKDKKEVGRGKMKDRAAFLLEEVSSDRFTYKVKEGERKIDAKNRLYLETVRDILYFPNRAVNDKGEDVIICSKKAQDLNEKKADRDKNHDKSKDTNQKKEGKNQEEKSENKEPYSDRMTWKPFAGIKLE

SEQ ID NO: 53 - protein, 1276 aa, Blautia sp.
MKISKVDHVKSGIDQKLSSQRGMLYKQPQKKYEGKQLEEHVRNLSRKAKALYQVFPVSGNSKMEKELQIINSFIKNILLRLDSGKTSEEIVGYINTYSVASQISGDHIQELVDQHLKESLRKYTCVGDKRIYVPDIIVALLKSKFNSETLQYDNSELKILIDFIREDYLKEKQIKQIVHSIENNSTPLRIAEINGQKRLIPANVDNPKKSYIFEFLKEYAQSDPKGQESLLQHMRYLILLYLYGPDKITDDYCEEIEAWNFGSIVMDNEQLFSEEASMLIQDRIYVNQQIEEGRQSKDTAKVKKNKSKYRMLGDKIEHSINESVVKHYQEACKAVEEKDIPWIKYISDHVMSVYSSKNRVDLDKLSLPYLAKNTWNTWISFIAMKYVDMGKGVYHFAMSDVDKVGKQDNLIIGQIDPKFSDGISSFDYERIKAEDDLHRSMSGYIAFAVNNFARAICSDEFRKKNRKEDVLTVGLDEIPLYDNVKRKLLQYFGGASNWDDSIIDIIDDKDLVACIKENLYVARNVNFHFAGSEKVQKKQDDILEEIVRKETRDIGKHYRKVFYSNNVAVFYCDEDIIKLMNHLYQREKPYQAQIPSYNKVISKTYLPDLIFMLLKGKNRTKISDPSIMNMFRGTFYFLLKEIYYNDFLQASNLKEMFCEGLKNNVKNKKSEKPYQNFMRRFEELENMGMDFGEICQQIMTDYEQQNKQKKKTATAVMSEKDKKIRTLDNDTQKYKHFRTLLYIGLREAFIIYLKDEKNKEWYEFLREPVKREQPEEKEFVNKWKLNQYSDCSELILKDSLAAAWYVVAHFINQAQLNHLIGDIKNYIQFISDIDRRAKSTGNPVSESTEIQIERYRKILRVLEFAKFFCGQITNVLTDYYQDENDFSTHVGHYVKFEKKNMEPAHALQAFSNSLYACGKEKKKAGFYYDGMNPIVNRNITLASMYGNKKLLENAMNPVTEQDIRKYYSLMAELDSVLKNGAVCKSEDEQKNLRHFQNLKNRIELVDVLTLSELVNDLVAQLIGWVYIRERDMMYLQLGLHYIKLYFTDSVAEDSYLRTLDLEEGSIADGAVLYQIASLYSFNLPMYVKPNKSSVYCKKHVNSVATKFDIFEKEYCNGDETVIENGLRLFENINLHKDMVKFRDYLAHFKYFAKLDESILELYSKAYDFFFSYNIKLKKSVSYVLTNVLLSYFINAKLSFSTYKSSGNKTVQHRTTKISVVAQTDYFTYKLRSIVKNKNGVESIENDDRRCEVVNIAARDKEFVDEVCNVINYNSDK

SEQ ID NO: 54 - protein, 1385 aa, Leptotrichia sp.
MGNLFGHKRWYEVRDKKDFKIKRKVKVKRNYDGNKYILNINENNNKEKIDNNKFIGEFVNYKKNNNVLKEFKRKFHAGNILFKLKGKEEIIRIENNDDFLETEEVVLYIEVYGKSEKLKALEITKKKIIDEAIRQGITKDDKKIEIKRQENEEEIEIDIRDEYTNKTLNDCSIILRIIENDELETKKSIYEIFKNINMSLYKIIEKIIENETEKVFENRYYEEHLREKLLKDNKIDVILTNFMEIREKIKSNLEIMGFVKFYLNVSGDKKKSENKKMFVEKILNTNVDLTVEDIVDFIVKELKFWNITKRIEKVKKFNNEFLENRRNRTYIKSYVLLDKHEKFKIERENKKDKIVKFFVENIKNNSIKEKIEKILAEFKINELIKKLEKELKKGNCDTEIFGIFKKHYKVNFDSKKFSNKSDEEKELYKIIYRYLKGRIEKILVNEQKVRLKKMEKIEIEKILNESILSEKILKRVKQYTLEHIMYLGKLRHNDIVKMTVNTDDFSRLHAKEELDLELITFFASTNMELNKIFNGKEKVTDFFGFNLNGQKITLKEKVPSFKLNILKKLNFINNENNIDEKLSHFYSFQKEGYLLRNKILHNSYGNIQETKNLKGEYENVEKLIKELKVSDEEISKSLSLDVIFEGKVDIINKINSLKIGEYKDKKYLPSFSKIVLEITRKFREINKDKLFDIESEKIILNAVKYVNKILYEKITSNEENEFLKTLPDKLVKKSNNKKENKNLLSIEEYYKNAQVSSSKGDKKAIKKYQNKVTNAYLEYLENTFTEIIDFSKFNLNYDEIKTKIEERKDNKSKIIIDSISTNINITNDIEYIISIFALLNSNTYINKIRNRFFATSVWLEKQNGTKEYDYENIISILDEVLLINLLRENNITDILDLKNAIIDAKIVENDETYIKNYIFESNEEKLKKRLFCEELVDKEDIRKIFEDENFKFKSFIKKNEIGNFKINFGILSNLECNSEVEAKKIIGKNSKKLESFIQNIIDEYKSNIRTLFSSEFLEKYKEEIDNLVEDTESENKNKFEKIYYPKEHKNELYIYKKNLFLNIGNPNFDKIYGLISKDIKNVDTKILFDDDIKKNKISEIDAILKNLNDKLNGYSNDYKAKYVNKLKENDDFFAKNIQNENYSSFGEFEKDYNKVSEYKKIRDLVEFNYLNKIESYLIDINWKLAIQMARFERDMHYIVNGLRELGIIKLSGYNTGISRAYPKRNGSDGFYTTTAYYKFFDEESYKKFEKICYGFGIDLSENSEINKPENESIRNYISHFYIVRNPFADYSIAEQIDRVSNLLSYSTRYNNSTYASVFEVFKKDVNLDYDELKKKFRLIGNNDILERLMKPKKVSVLELESYNSDYIKNLIIELLTKIENTNDTL

SEQ ID NO: 55 - protein, 1334 aa, Lachnospiraceae
MKISKVDHTRMAVAKGNQHRRDEISGILYKDPTKTGSIDFDERFKKLNCSAKILYHVFNGIAEGSNKYKNIVDKVNNNLDRVLFTGKSYDRKSIIDIDTVLRNVEKINAFDRISTEEREQIIDDLLEIQLRKGLRKGKAGLREVLLIGAGVIVRTDKKQEIADFLEILDEDFNKTNQAKNIKLSIENQGLVVSPVSRGEERIFDVSGAQKGKSSKKAQEKEALSAFLLDYADLDKNVRFEYLRKIRRLINLYFYVKNDDVMSLTEIPAEVNLEKDFDIWRDHEQRKEENGDFVGCPDILLADRDVKKSNSKQVKIAERQLRESIREKNIKRYRFSIKTIEKDDGTYFFANKQISVFWIHRIENAVERILGSINDKKLYRLRLGYLGEKVWKDILNFLSIKYIAVGKAVFNFAMDDLQEKDRDIEPGKISENAVNGLTSFDYEQIKADEMLQREVAVNVAFAANNLARVTVDIPQNGEKEDILLWNKSDIKKYKKNSKKGILKSILQFFGGASTWNMKMFEIAYHDQPGDYEENYLYDIIQIIYSLRNKSFHFKTYDHGDKNWNRELIGKMIEHDAERVISVEREKFHSNNLPMFYKDADLKKILDLLYSDYAGRASQVPAFNTVLVRKNFPEFLRKDMGYKVHFNNPEVENQWHSAVYYLYKEIYYNLFLRDKEVKNLFYTSLKNIRSEVSDKKQKLASDDFASRCEEIEDRSLPEICQIIMTEYNAQNFGNRKVKSQRVIEKNKDIFRHYKMLLIKTLAGAFSLYLKQERFAFIGKATPIPYETTDVKNFLPEWKSGMYASFVEEIKNNLDLQEWYIVGRFLNGRMLNQLAGSLRSYIQYAEDIERRAAENRNKLFSKPDEKIEACKKAVRVLDLCIKISTRISAEFTDYFDSEDDYADYLEKYLKYQDDAIKELSGSSYAALDHFCNKDDLKFDIYVNAGQKPILQRNIVMAKLFGPDNILSEVMEKVTESAIREYYDYLKKVSGYRVRGKCSTEKEQEDLLKFQRLKNAVEFRDVTEYAEVINELLGQLISWSYLRERDLLYFQLGFHYMCLKNKSFKPAEYVDIRRNNGTIIHNAILYQIVSMYINGLDFYSCDKEGKTLKPIETGKGVGSKIGQFIKYSQYLYNDPSYKLEIYNAGLEVFENIDEHDNITDLRKYVDHFKYYAYGNKMSLLDLYSEFFDRFFTYDMKYQKNVVNVLENILLRHFVIFYPKFGSGKKDVGIRDCKKERAQIEISEQSLTSEDFMFKLDDKAGEEAKKFPARDERYLQTIAKLLYYPNEIEDMNRFMKKGETINKKVQFNRKKKITRKQKNNSSNEVLSSTMGYLFKNIKL

SEQ ID NO: 56 - protein, 500 aa, Chloroflexus aggregans
MTDQVRREEVAAGELADTPLAAAQTPAADAAVAATPAPAEAVAPTPEQAVDQPATTGESEAPVTTAQAAAHEAEPAEATGASFTPVSEQQPQKPRRLKDLQPGMELEGKVTSIALYGIFVDVGVGRDGLVHISEMSDRRIDTPSELVQIGDTVKVWVKSVDLDARRISLTMLNPSRGEKPRRSRQSQPAQPQPRRQEVDREKLASLKVGEIVEGVITGFAPFGAFADIGVGKDGLIHISELSEGRVEKPEDAVKVGERYQFKVLEIDGEGTRISLSLRRAQRTQRMQQLEPGQIIEGTVSGIATFGAFVDIGVGRDGLVHISALAPHRVAKVEDVVKVGDKVKVKVLGVDPQSKRISLTMRLEEEQPATTAGDEAAEPAEEVTPTRRGNLERFAAAAQTARERSERGERSERGERRERRERRPAQSSPDTYIVGEDDDESFEGNATIEDLLTKFGGSSSRRDRDRRRRHEDDDDEEMERPSNRRQREAIRRTLQQIGYDE

SEQ ID NO: 57 - protein, 249 aa, Demequina aurantiaca
MDLTWHALLILFIVALLAGFLDTLAGGGGLLTVPALLLTGIPPLQALGTNKLQSSFGTGMATYQVIRKKRVHWRDVRWPMVWAFLGSAAGAVAVQFIDTDALLIIIPVVLALVAAYFLFVPKSHLPPPEPRMSDPAYEATLVPIIGAYDGAFGPGTGSLYALSGVALRAKTLVQSTAIAKTLNFATNFAALLVFAFAGHMLWTVGAVMIAGQLIGAYAGSHMLFRVNPLVLRVLIVVMSLGMLIRVLLD

SEQ ID NO: 58 - protein, 1235 aa, Thalassospira sp.
MRIIKPYGRSHVEGVATQEPRRKLRLNSSPDISRDIPGFAQSHDALIIAQWISAIDKIATKPKPDKKPTQAQINLRTTLGDAAWQHVMAENLLPAATDPAIREKLHLIWQSKIAPWGTARPQAEKDGKPTPKGGWYERFCGVLSPEAITQNVARQIAKDIYDHLHVAAKRKGREPAKQGESSNKPGKFKPDRKRGLIEERAESIAKNALRPGSHAPCPWGPDDQATYEQAGDVAGQIYAAARDCLEEKKRRSGNRNTSSVQYLPRDLAAKILYAQYGRVFGPDTTIKAALDEQPSLFALHKAIKDCYHRLINDARKRDILRILPRNMAALFRLVRAQYDNRDINALIRLGKVIHYHASEQGKSEHHGIRDYWPSQQDIQNSRFWGSDGQADIKRHEAFSRIWRHIIALASRTLHDWADPHSQKFSGENDDILLLAKDAIEDDVFKAGHYERKCDVLFGAQASLFCGAEDFEKAILKQAITGTGNLRNATFHFKGKVRFEKELQELTKDVPVEVQSAIAALWQKDAEGRTRQIAETLQAVLAGHFLTEEQNRHIFAALTAAMAQPGDVPLPRLRRVLARHDSICQRGRILPLSPCPDRAKLEESPALTCQYTVLKMLYDGPFRAWLAQQNSTILNHYIDSTIARTDKAARDMNGRKLAQAEKDLITSRAADLPRLSVDEKMGDFLARLTAATATEMRVQRGYQSDGENAQKQAAFIGQFECDVIGRAFADFLNQSGFDFVLKLKADTPQPDAAQCDVTALIAPDDISVSPPQAWQQVLYFILHLVPVDDASHLLHQIRKWQVLEGKEKPAQIAHDVQSVLMLYLDMHDAKFTGGAALHGIEKFAEFFAHAADFRAVFPPQSLQDQDRSIPRRGLREIVRFGHLPLLQHMSGTVQITHDNVVAWQAARTAGATGMSPIARRQKQREELHALAVERTARFRNADLQNYMHALVDVIKHRQLSAQVTLSDQVRLHRLMMGVLGRLVDYAGLWERDLYFVVLALLYHHGATPDDVFKGQGKKNLADGQVVAALKPKNRKAAAPVGVFDDLDHYGIYQDDRQSIRNGLSHFNMLRGGKAPDLSHWVNQTRSLVAHDRKLKNAVAKSVIEMLAREGFDLDWGIQTDRGQHILSHGKIRTRQAQHFQKSRLHIVKKSAKPDKNDTVKIRENLHGDAMVERVVQLFAAQVQKRYDITVEKRLDHLFLKPQDQKGKNGIHTHNGWSKTEKKRRPSRENRKGNHEN

SEQ ID NO: 59 - protein, 1312 aa, Pseudobutyrivibrio sp.
MKFSKESHRKTAVGVTESNGIIGLLYKDPLNEKEKIEDVVNQRANSTKRLFNLFGTEATSKDISRASKDLAKVVNKAIGNLKGNKKFNKKEQITKGLNTKIIVEELKNVLKDEKKLIVNKDIIDEACSRLLKTSFRTAKTKQAVKMILTAVLIENTNLSKEDEAFVHEYFVKKLVNEYNKTSVKKQIPVALSNQNMVIQPNSVNGTLEISETKKSKETKTTEKDAFRAFLRDYATLDENRRHKMRLCLRNLVNLYFYGETSVSKDDFDEWRDHEDKKQNDELFVKKIVSIKTDRKGNVKEVLDVDATIDAIRTNNIACYRRALAYANENPDVFFSDTMLNKFWIHHVENEVERIYGHINNNTGDYKYQLGYLSEKVWKGIINYLSIKYIAEGKAVYNYAMNALAKDNNSNAFGKLDEKFVNGITSFEYERIKAEETLQRECAVNIAFAANHLANATVDLNEKDSDFLLLKHEDNKDTLGAVARPNILRNILQFFGGKSRWNDFDFSGIDEIQLLDDLRKMIYSLRNSSFHFKTENIDNDSWNTKLIGDMFAYDFNMAGNVQKDKMYSNNVPMFYSTSDIEKMLDRLYAEVHERASQVPSFNSVFVRKNFPDYLKNDLKITSAFGVDDALKWQSAVYYVCKEIYYNDFLQNPETFTMLKDYVQCLPIDIDKSMDQKLKSERNAHKNFKEAFATYCKECDSLSAICQMIMTEYNNQNKGNRKVISARTKDGDKLIYKHYKMILFEALKNVFTIYLEKNINTYGFLKKPKLINNVPAIEEFLPNYNGRQYETLVNRITEETELQKWYIVGRLLNPKQVNQLIGNFRSYVQYVNDVARRAKQTGNNLSNDNIAWDVKNIIQIFDVCTKLNGVTSNILEDYFDDGDDYARYLKNFVDYTNKNNDHSATLLGDFCAKEIDGIKIGIYHDGTNPIVNRNIIQCKLYGATGIISDLTKDGSILSVDYEIIKKYMQMQKEIKVYQQKGICKTKEEQQNLKKYQELKNIVELRNIIDYSEILDELQGQLINWGYLRERDLMYFQLGFHYLCLHNESKKPVGYNNAGDISGAVLYQIVAMYTNGLSLIDANGKSKKNAKASAGAKVGSFCSYSKEIRGVDKDTKEDDDPIYLAGVELFENINEHQQCINLRNYIEHFHYYAKHDRSMLDLYSEVFDRFFTYDMKYTKNVPNMMYNILLQHLVVPAFEFGSSEKRLDDNDEQTKPRAMFTLREKNGLSSEQFTYRLGDGNSTVKLSARGDDYLRAVASLLYYPDRAPEGLIRDAEAEDKFAKINHSNPKSDNRNNRGNFKNPKVQWYNNKTKRK

SEQ ID NO: 60 - protein, 1343 aa, Butyrivibrio sp.
MKISKVDHRKTAVKITDNKGAEGFIYQDPTRDSSTMEQIISNRARSSKVLFNIFGDTKKSKDLNKYTESLIIYVNKAIKSLKGDKRNNKYEEITESLKTERVLNALIQAGNEFTCSENNIEDALNKYLKKSFRVGNTKSALKKLLMAAYCGYKLSIEEKEEIQNYFVDKLVKEYNKDTVLKYTAKSLKHQNMVVQPDTDNHVFLPSRIAGATQNKMSEKEALTEFLKAYAVLDEEKRHNLRIILRKLVNLYFYESPDFIYPENNEWKEHDDRKNKTETFVSPVKVNEEKNGKTFVKIDVPATKDLIRLKNIECYRRSVAETAGNPITYFTDHNISKFWIHHIENEVEKIFALLKSNWKDYQFSVGYISEKVWKEIINYLSIKYIAIGKAVYNYALEDIKKNDGTLNFGVIDPSFYDGINSFEYEKIKAEETFQREVAVYVSFAVNHLSSATVKLSEAQSDMLVLNKNDIEKIAYGNTKRNILQFFGGQSKWKEFDFDRYINPVNYTDIDFLFDIKKMVYSLRNESFHFTTTDTESDWNKNLISAMFEYECRRISTVQKNKFFSNNLPLFYGENSLERVLHKLYDDYVDRMSQVPSFGNVFVRKKFPDYMKEIGIKHNLSSEDNLKLQGALYFLYKEIYYNAFISSEKAMKIFVDLVNKLDTNARDDKGRITHEAMAHKNFKDAISHYMTHDCSLADICQKIMTEYNQQNTGHRKKQTTYSSEKNPEIFRHYKMILFMLLQKAMTEYISSEEIFDFIMKPNSPKTDIKEEEFLPQYKSCAYDNLIKLIADNVELQKWYITARLLSPREVNQLIGSFRSYKQFVSDIERRAKETNNSLSKSGMTVDVENITKVLDLCTKLNGRFSNELTDYFDSKDDYAVYVSKFLDFGFKIDEKFPAALLGEFCNKEENGKKIGIYHNGTEPILNSNIIKSKLYGITDVVSRAVKPVSEKLIREYLQQEVKIKPYLENGVCKNKEEQAALRKYQELKNRIEFRDIVEYSEIINELMGQLINFSYLRERDLMYFQLGFHYLCLNNYGAKPEGYYSIVNDKRTIKGAILYQIVAMYTYGLPIYHYVDGTISDRRKNKKTVLDTLNSSETVGAKIKYFIYYSDELFNDSLILYNAGLELFENINEHENIVNLRKYIDHFKYYVSQDRSLLDIYSEVFDRYFTYDRKYKKNVMNLFSNIMLKHFIITDFEFSTGEKTIGEKNTAKKECAKVRIKRGGLSSDKFTYKFKDAKPIELSAKNTEFLDGVARILYYPENVVLTDLVRNSEVEDEKRIEKYDRNHNSSPTRKDKTYKQDVKKNYNKKTSKAFDSSKLDTKSVGNNLSDNPVLKQFLSESKKKR

SEQ ID NO: 61 - protein, 1276 aa, Blautia sp.; identical to SEQ ID NO: 53

SEQ ID NO: 62 - protein, 1168 aa, Leptotrichia marseille
MKITKIDGISHKKYIKEGKLVKSTSEENKTDERLSELLTIRLDTYIKNPDNASEEENRIRRENLKEFFSNKVLYLKDGILYLKDRREKNQLQNKNYSEEDISEYDLKNKNNFLVLKKILLNEDINSEELEIFRNDFEKKLDKINSLKYSLEENKANYQKINENNIKKVEGKSKRNIFYNYYKDSAKRNDYINNIQEAFDKLYKKEDIENLFFLIENSKKHEKYKIRECYHKIIGRKNDKENFATIIYEEIQNVNNMKELIEKVPNVSELKKSQVFYKYYLNKEKLNDENIKYVFCHFVEIEMSKLLKNYVYKKPSNISNDKVKRIFEYQSLKKLIENKLLNKLDTYVRNCGKYSFYLQDGEIATSDFIVGNRQNEAFLRNIIGVSSTAYFSLRNILETENENDITGRMRGKTVKNNKGEEKYISGEIDKLYDNNKQNEVKKNLKMFYSYDFNMNSKKEIEDFFSNIDEAISSIRHGIVHFNLELEGKDIFTFKNIVPSQISKKMFHDEINEKKLKLKIFKQLNSANVFRYLEKYKILNYLNRTRFEFVNKNIPFVPSFTKLYSRIDDLKNSLGIYWKTPKTNDDNKTKEITDAQIYLLKNIYYGEFLNYFMSNNGNFFEITKEIIELNKNDKRNLKTGFYKLQKFENLQEKTPKEYLANIQSLYMINAGNQDEEEKDTYIDFIQKIFLKGFMTYLANNGRLSLIYIGSDEETNTSLAEKKQEFDKFLKKYEQNNNIEIPYEINEFVREIKLGKILKYTERLNMFYLILKLLNHKELTNLKGSLEKYQSANKEEAFSDQLELINLLNLDNNRVTEDFELEADEIGKFLDFNGNKVKDNKELKKFDTNKIYFDGENIIKHRAFYNIKKYGMLNLLEKISDEAKYKISIEELKNYSKKKNEIEENHTTQENLHRKYARPRKDEKFTDEDYKKYEKAIRNIQQYTHLKNKVEFNELNLLQSLLLRILHRLVGYTSIWERDLRFRLKGEFPENQYIEEIFNFDNSKNVKYKNGQIVEKYINFYKELYKDDTEKISIYSDKKVKELKKEKKDLYIRNYIAHFNYIPNAEISLLEMLENLRKLLSYDRKLKNAIMKSIVDILKEYGFVVTFKIEKDKKIRIESLKSEEVVHLKKLKLKDNDKKKEPIKTYRNSKELCKLVKVMFEYKMKEKKSEN

SEQ ID NO: 63 - protein, 1138 aa, Bacterioides ihuae
MRITKVKVKESSDQKDKMVLIHRKVGEGTLVLDENLADLTAPIIDKYKDKSFELSLLKQTLVSEKEMNIPKCDKCTAKERCLSCKQREKRLKEVRGAIEKTIGAVIAGRDIIPRLNIFNEDEICWLIKPKLRNEFTFKDVNKQVVKLNLPKVLVEYSKKNDPTLFLAYQQWIAAYLKNKKGHIKKSILNNRVVIDYSDESKLSKRKQALELWGEEYETNQRIALESYHTSYNIGELVTLLPNPEEYVSDKGEIRPAFHYKLKNVLQMHQSTVFGTNEILCINPIFNENRANIQLSAYNLEVVKYFEHYFPIKKKKKNLSLNQAIYYLKVETLKERLSLQLENALRMNLLQKGKIKKHEFDKNTCSNTLSQIKRDEFFVLNLVEMCAFAANNIRNIVDKEQVNEILSKKDLCNSLSKNTIDKELCTKFYGADFSQIPVAIWAMRGSVQQIRNEIVHYKAEAIDKIFALKTFEYDDMEKDYSDTPFKQYLELSIEKIDSFFIEQLSSNDVLNYYCTEDVNKLLNKCKLSLRRTSIPFAPGFKTIYELGCHLQDSSNTYRIGHYLMLIGGRVANSTVTKASKAYPAYRFMLKLIYNHLFLNKFLDNHNKRFFMKAVAFVLKDNRENARNKFQYAFKEIRMMNNDESIASYMSYIHSLSVQEQEKKGDKNDKVRYNTEKFIEKVFVKGFDDFLSWLGVEFILSPNQEERDKTVTREEYENLMIKDRVEHSINSNQESHIAFFTFCKLLDANHLSDLRNEWIKFRSSGDKEGFSYNFAIDIIELCLLTVDRVEQRRDGYKEQTELKEYLSFFIKGNESENTVWKGFYFQQDNYTPVLYSPIELIRKYGTLELLKLIIVDEDKITQGEFEEWQTLKKVVEDKVTRRNELHQEWEDMKNKSSFSQEKCSIYQKLCRDIDRYNWLDNKLHLVHLRKLHNLVIQILSRMARFIALWDRDFVLLDASRANDDYKLLSFFNFRDFINAKKTKTDDELLAEFGSKIEKKNAPFIKAEDVPLMVECIEAKRSFYQKVFFRNNLQVLADRNFIAHYNYISKTAKCSLFEMIIKLRTLMYYDRKLRNAVVKSIANVFDQNGMVLQLSLDDSHELKVDKVISKRIVHLKNNNIMTDQVPEEYYKICRRLLEMKK

SEQ ID NO: 64 - protein, 697 aa, Porphyromonadaceae bacterium
MEFRDSIFKSLLQKEIEKAPLCFAEKLISGGVFSYYPSERLKEFVGNHPFSLFRKTMPFSPGFKRVMKSGGNYQNANRDGRFYDLDIGVYLPKDGFGDEEWNARYFLMKLIYNQLFLPYFADAENHLFRECVDFVKRVNRDYNCKNNNSEEQAFIDIRSMREDESIADYLAFIQSNIIIEENKKKETNKEGQINFNKFLLQVFVKGFDSFLKDRTELNFLQLPELQGDGTRGDDLESLDKLGAVVAVDLKLDATGIDADLNENISFYTFCKLLDSNHLSRLRNEIIKYQSANSDFSHNEDFDYDRIISIIELCMLSADHVSTNDNESIFPNNDKDFSGIRPYLSTDAKVETFEDLYVHSDAKTPITNATMVLNWKYGTDKLFERLMISDQDFLVTEKDYFVWKELKKDIEEKIKLREELHSLWVNTPKGKKGAKKKNGRETTGEFSEENKKEYLEVCREIDRYVNLDNKLHFVHLKRMHSLLIELLGRFVGFTYLFERDYQYYHLEIRSRRNKDAGVVDKLEYNKIKDQNKYDKDDFFACTFLYEKANKVRNFIAHFNYLTMWNSPQEEEHNSNLSGAKNSSGRQNLKCSLTELINELREVMSYDRKLKNAVTKAVIDLFDKHGMVIKFRIVNNNNNDNKNKHHLELDDIVPKKIMHLRGIKLKRQDGKPIPIQTDSVDPLYCRMWKKLLDLKPTPF

SEQ ID NO: 65 - protein, 204 aa, Listeria riparia
MHDAWAENPKKPQSDAFLKEYKACCEAIDTYNWHKNKATLVYVNELHHLLIDILGRLVGYVAIADRDFQCMANQYLKSSGHTERVDSWINTIRKNRPDYIEKLDIFMNKAGLFVSEKNGRNYIAHLNYLSPKHKYSLLYLFEKLREMLKYDRKLKNAVTKSLIDLLDKHGMCVVFANLKNNKHRLVIASLKPKKIETFKWKKIK

SEQ ID NO: 66 - protein, 1082 aa, Insolitispirillum peregrinum
MRIIRPYGSSTVASPSPQDAQPLRSLQRQNGTFDVAEFSRRHPELVLAQWVAMLDKIIRKPAPGKNSTALPRPTAEQRRLRQQVGAALWAEMQRHTPVPPELKAVWDSKVHPYSKDNAPATAKTPSHRGRWYDRFGDPETSAATVAEGVRRHLLDSAQPFRANGGQPKGKGVIEHRALTIQNGTLLHHHQSEKAGPLPEDWSTYRADELVSTIGKDARWIKVAASLYQHYGRIFGPTTPISEAQTRPEFVLHTAVKAYYRRLFKERKLPAERLERLLPRTGEALRHAVTVQHGNRSLADAVRIGKILHYGWLQNGEPDPWPDDAALYSSRYWGSDGQTDIKHSEAVSRVWRRALTAAQRTLTSWLYPAGTDAGDILLIGQKPDSIDRNRLPLLYGDSTRHWTRSPGDVWLFLKQTLENLRNSSFHFKTLSAFTSHLDGTCESEPAEQQAAQALWQDDRQQDHQQVFLSLRALDATTYLPTGPLHRIVNAVQSTDATLPLPRFRRVVTRAANTRLKGFPVEPVNRRTMEDDPLLRCRYGVLKLLYERGFRAWLETRPSIASCLDQSLKRSTKAAQTINGKNSPQGVEILSRATKLLQAEGGGGHGIHDLFDRLYAATAREMRVQVGYHHDAEAARQQAEFIEDLKCEVVARAFCAYLKTLGIQGDTFRRQPEPLPTWPDLPDLPSSTIGTAQAALYSVLHLMPVEDVGSLLHQLRRWLVALQARGGEDGTAITATIPLLELYLNRHDAKFSGGGAGTGLRWDDWQVFFDCQATFDRVFPPGPALDSHRLPLRGLREVLRFGRVNDLAALIGQDKITAAEVDRWHTAEQTIAAQQQRREALHEQLSRKKGTDAEVDEYRALVTAIADHRHLTAHVTLSNVVRLHRLMTTVLGRLVDYGGLWERDLTFVTLYEAHRLGGLRNLLSESRVNKFLDGQTPAALSKKNNAEENGMISKVLGDKARRQIRNDFAHFNMLQQGKKTINLTDEINNARKLMAHDRKLKNAITRSVTTLLQQDGLDIVWTMDASHRLTDAKIDSRNAIHLHKTHNRANIREPLHGKSYCRWVAALFGATSTPSATKKSDKIR

SEQ ID NO: 67 - protein, 1224 aa, Bergeyella zoohelcum
MENKTSLGNNIYYNPFKPQDKSYFAGYFNAAMENTDSVFRELGKRLKGKEYTSENFFDAIFKENISLVEYERYVKLLSDYFPMARLLDKKEVPIKERKENFKKNFKGIIKAVRDLRNFYTHKEHGEVEITDEIFGVLDEMLKSTVLTVKKKKVKTDKTKEILKKSIEKQLDILCQKKLEYLRDTARKIEEKRRNQRERGEKELVAPFKYSDKRDDLIAAIYNDAFDVYIDKKKDSLKESSKAKYNTKSDPQQEEGDLKIPISKNGVVFLLSLFLTKQEIHAFKSKIAGFKATVIDEATVSEATVSHGKNSICFMATHEIFSHLAYKKLKRKVRTAEINYGEAENAEQLSVYAKETLMMQMLDELSKVPDVVYQNLSEDVQKTFIEDWNEYLKENNGDVGTMEEEQVIHPVIRKRYEDKFNYFAIRFLDEFAQFPTLRFQVHLGNYLHDSRPKENLISDRRIKEKITVFGRLSELEHKKALFIKNTETNEDREHYWEIFPNPNYDFPKENISVNDKDFPIAGSILDREKQPVAGKIGIKVKLLNQQYVSEVDKAVKAHQLKQRKASKPSIQNIIEEIVPINESNPKEAIVFGGQPTAYLSMNDIHSILYEFFDKWEKKKEKLEKKGEKELRKEIGKELEKKIVGKIQAQIQQIIDKDTNAKILKPYQDGNSTAIDKEKLIKDLKQEQNILQKLKDEQTVREKEYNDFIAYQDKNREINKVRDRNHKQYLKDNLKRKYPEAPARKEVLYYREKGKVAVWLANDIKRFMPTDFKNEWKGEQHSLLQKSLAYYEQCKEELKNLLPEKVFQHLPFKLGGYFQQKYLYQFYTCYLDKRLEYISGLVQQAENFKSENKVFKKVENECFKFLKKQNYTHKELDARVQSILGYPIFLERGFMDEKPTIIKGKTFKGNEALFADWFRYYKEYQNFQTFYDTENYPLVELEKKQADRKRKTKIYQQKKNDVFTLLMAKHIFKSVFKQDSIDQFSLEDLYQSREERLGNQERARQTGERNTNYIWNKTVDLKLCDGKITVENVKLKNVGDFIKYEYDQRVQAFLKYEENIEWQAFLIKESKEEENYPYVVEREIEQYEKVRREELLKEVHLIEEYILEKVKDKEILKKGDNQNFKYYILNGLLKQLKNEDVESYKVFNLNTEPEDVNINQLKQEATDLEQKAFVLTYIRNKFAHNQLPKKEFWDYCQEKYGKIEKEKTYAEYFAEVFKKEKEALIK

SEQ ID NO: 68 - protein, 1126 aa, Prevotella intermedia
MEDDKKTTDSIRYELKDKHFWAAFLNLARHNVYITVNHINKILEEGEINRDGYETTLKNTWNEIKDINKKDRLSKLIIKHFPFLEAATYRLNPTDTTKQKEEKQAEAQSLESLRKSFFVFIYKLRDLRNHYSHYKHSKSLERPKFEEGLLEKMYNIFNASIRLVKEDYQYNKDINPDEDFKHLDRTEEEFNYYFTKDNEGNITESGLLFFVSLFLEKKDAIWMQQKLRGFKDNRENKKKMTNEVFCRSRMLLPKLRLQSTQTQDWILLDMLNELIRCPKSLYERLREEDREKFRVPIEIADEDYDAEQEPFKNTLVRHQDRFPYFALRYFDYNEIFTNLRFQIDLGTYHFSIYKKQIGDYKESHHLTHKLYGFERIQEFTKQNRPDEWRKFVKTFNSFETSKEPYIPETTPHYHLENQKIGIRFRNDNDKIWPSLKTNSEKNEKSKYKLDKSFQAEAFLSVHELLPMMFYYLLLKTENTDNDNEIETKKKENKNDKQEKHKIEEIIENKITEIYALYDTFANGEIKSIDELEEYCKGKDIEIGHLPKQMIAILKDEHKVMATEAERKQEEMLVDVQKSLESLDNQINEEIENVERKNSSLKSGKIASWLVNDMMRFQPVQKDNEGKPLNNSKANSTEYQLLQRTLAFFGSEHERLAPYFKQTKLIESSNPHPFLKDTEWEKCNNILSFYRSYLEAKKNFLESLKPEDWEKNQYFLKLKEPKTKPKTLVQGWKNGFNLPRGIFTEPIRKWFMKHRENITVAELKRVGLVAKVIPLFFSEEYKDSVQPFYNYHFNVGNINKPDEKNFLNCEERRELLRKKKDEFKKMTDKEKEENPSYLEFKSWNKFERELRLVRNQDIVTWLLCMELFNKKKIKELNVEKIYLKNINTNTTKKEKNTEEKNGEEKNIKEKNNILNRIMPMRLPIKVYGRENFSKNKKKKIRRNTFFTVYIEEKGTKLLKQGNFKALERDRRLGGLFSFVKTPSKAESKSNTISKLRVEYELGEYQKARIEIIKDMLALEKTLIDKYNSLDTDNFNKMLTDWLELKGEPDKASFQNDVDLLIAVRNAFSHNQYPMRNRIAFANINPFSLSSANTSEEKGLGIANQLKDKTHKTIEKIIEIEKPIETKE

SEQ ID NO: 69 - protein, 1127 aa, Prevotella buccae
MQKQDKLFVDRKKNAIFAFPKYITIMENKEKPEPIYYELTDKHFWAAFLNLARHNVYTTINHINRRLEIAELKDDGYMMGIKGSWNEQAKKLDKKVRLRDLIMKHFPFLEAAAYEMTNSKSPNNKEQREKEQSEALSLNNLKNVLFIFLEKLQVLRNYYSHYKYSEESPKPIFETSLLKNMYKVFDANVRLVKRDYMHHENIDMQRDFTHLNRKKQVGRTKNIIDSPNFHYHFADKEGNMTIAGLLFFVSLFLDKKDAIWMQKKLKGFKDGRNLREQMTNEVFCRSRISLPKLKLENVQTKDWMQLDMLNELVRCPKSLYERLREKDRESFKVPFDIFSDDYNAEEEPFKNTLVRHQDRFPYFVLRYFDLNEIFEQLRFQIDLGTYHFSIYNKRIGDEDEVRHLTHHLYGFARIQDFAPQNQPEEWRKLVKDLDHFETSQEPYISKTAPHYHLENEKIGIKFCSAHNNLFPSLQTDKTCNGRSKFNLGTQFTAEAFLSVHELLPMMFYYLLLTKDYSRKESADKVEGIIRKEISNIYAIYDAFANNEINSIADLTRRLQNTNILQGHLPKQMISILKGRQKDMGKEAERKIGEMIDDTQRRLDLLCKQTNQKIRIGKRNAGLLKSGKIADWLVNDMMRFQPVQKDQNNIPINNSKANSTEYRMLQRALALFGSENFRLKAYFNQMNLVGNDNPHPFLAETQWEHQTNILSFYRNYLEARKKYLKGLKPQNWKQYQHFLILKVQKTNRNTLVTGWKNSFNLPRGIFTQPIREWFEKHNNSKRIYDQILSFDRVGFVAKAIPLYFAEEYKDNVQPFYDYPFNIGNRLKPKKRQFLDKKERVELWQKNKELFKNYPSEKKKTDLAYLDFLSWKKFERELRLIKNQDIVTWLMFKELFNMATVEGLKIGEIHLRDIDTNTANEESNNILNRIMPMKLPVKTYETDNKGNILKERPLATFYIEETETKVLKQGNFKALVKDRRLNGLFSFAETTDLNLEEHPISKLSVDLELIKYQTTRISIFEMTLGLEKKLIDKYSTLPTDSFRNMLERWLQCKANRPELKNYVNSLIAVRNAFSHNQYPMYDATLFAEVKKFTLFPSVDTKKIELNIAPQLLEIVGKAIKEIEKSENKN

SEQ ID NO: 70 - protein, 1135 aa, Porphyrmonas gingivalis
MNTVPASENKGQSRTVEDDPQYFGLYLNLARENLIEVESHVRIKFGKKKLNEESLKQSLLCDHLLSVDRWTKVYGHSRRYLPFLHYFDPDSQIEKDHDSKTGVDPDSAQRLIRELYSLLDFLRNDFSHNRLDGTTFEHLEVSPDISSFITGTYSLACGRAQSRFAVFFKPDDFVLAKNRKEQLISVADGKECLTVSGFAFFICLFLDREQASGMLSRIRGFKRTDENWARAVHETFCDLCIRHPHDRLESSNTKEALLLDMLNELNRCPRILYDMLPEEERAQFLPALDENSMNNLSENSLDEESRLLWDGSSDWAEALTKRIRHQDRFPYLMLRFIEEMDLLKGIRFRVDLGEIELDSYSKKVGRNGEYDRTITDHALAFGKLSDFQNEEEVSRMISGEASYPVRFSLFAPRYAIYDNKIGYCHTSDPVYPKSKTGEKRALSNPQSMGFISVHDLRKLLLMELLCEGSFSRMQSDFLRKANRILDETAEGKLQFSALFPEMRHRFIPPQNPKSKDRREKAETTLEKYKQEIKGRKDKLNSQLLSAFDMDQRQLPSRLLDEWMNIRPASHSVKLRTYVKQLNEDCRLRLRKFRKDGDGKARAIPLVGEMATFLSQDIVRMIISEETKKLITSAYYNEMQRSLAQYAGEENRRQFRAIVAELRLLDPSSGHPFLSATMETAHRYTEGFYKCYLEKKREWLAKIFYRPEQDENTKRRISVFFVPDGEARKLLPLLIRRRMKEQNDLQDWIRNKQAHPIDLPSHLFDSKVMELLKVKDGKKKWNEAFKDWWSTKYPDGMQPFYGLRRELNIHGKSVSYIPSDGKKFADCYTHLMEKTVRDKKRELRTAGKPVPPDLAADIKRSFHRAVNEREFMLRLVQEDDRLMLMAINKMMTDREEDILPGLKNIDSILDEENQFSLAVHAKVLEKEGEGGDNSLSLVPATIEIKSKRKDWSKYIRYRYDRRVPGLMSHFPEHKATLDEVKTLLGEYDRCRIKIFDWAFALEGAIMSDRDLKPYLHESSSREGKSGEHSTLVKMLVEKKGCLTPDESQYLILIRNKAAHNQFPCAAEMPLIYRDVSAKVGSIEGSSAKDLPEGSSLVDSLWKKYEMIIRKILPILDPENRFFGKLLNNMSQPINDL

SEQ ID NO: 71 - protein, 1115 aa, Bacteroides pyrogenes
MESIKNSQKSTGKTLQKDPPYFGLYLNMALLNVRKVENHIRKWLGDVALLPEKSGFHSLLTTDNLSSAKWTRFYYKSRKFLPFLEMFDSDKKSYENRRETAECLDTIDRQKISSLLKEVYGKLQDIRNAFSHYHIDDQSVKHTALIISSEMHRFIENAYSFALQKTRARFTGVFVETDFLQAEEKGDNKKFFAIGGNEGIKLKDNALIFLICLFLDREEAFKFLSRATGFKSTKEKGFLAVRETFCALCCRQPHERLLSVNPREALLMDMLNELNRCPDILFEMLDEKDQKSFLPLLGEEEQAHILENSLNDELCEAIDDPFEMIASLSKRVRYKNRFPYLMLRYIEEKNLLPFIRFRIDLGCLELASYPKKMGEENNYERSVTDHAMAFGRLTDFHNEDAVLQQITKGITDEVRFSLYAPRYAIYNNKIGFVRTSGSDKISFPTLKKKGGEGHCVAYTLQNTKSFGFISIYDLRKILLLSFLDKDKAKNIVSGLLEQCEKHWKDLSENLFDAIRTELQKEFPVPLIRYTLPRSKGGKLVSSKLADKQEKYESEFERRKEKLTEILSEKDFDLSQIPRRMIDEWLNVLPTSREKKLKGYVETLKLDCRERLRVFEKREKGEHPLPPRIGEMATDLAKDIIRMVIDQGVKQRITSAYYSEIQRCLAQYAGDDNRRHLDSIIRELRLKDTKNGHPFLGKVLRPGLGHTEKLYQRYFEEKKEWLEATFYPAASPKRVPRFVNPPTGKQKELPLIIRNLMKERPEWRDWKQRKNSHPIDLPSQLFENEICRLLKDKIGKEPSGKLKWNEMFKLYWDKEFPNGMQRFYRCKRRVEVFDKVVEYEYSEEGGNYKKYYEALIDEVVRQKISSSKEKSKLQVEDLTLSVRRVFKRAINEKEYQLRLLCEDDRLLFMAVRDLYDWKEAQLDLDKIDNMLGEPVSVSQVIQLEGGQPDAVIKAECKLKDVSKLMRYCYDGRVKGLMPYFANHEATQEQVEMELRHYEDHRRRVFNWVFALEKSVLKNEKLRRFYEESQGGCEHRRCIDALRKASLVSEEEYEFLVHIRNKSAHNQFPDLEIGKLPPNVTSGFCECIWSKYKAIICRIIPFIDPERRFFGKLLEQK

SEQ ID NO: 72 - protein, 953 aa, Alistipes sp.
MSNEIGAFREHQFAYAPGNEKQEEATFATYFNLALSNVEGMMFGEVESNPDKIEKSLDTLPPAILRQIASFIWLSKEDHPDKAYSTEEVKVIVTDLVRRLCFYRNYFSHCFYLDTQYFYSDELVDTTAIGEKLPYNFHHFITNRLFRYSLPEITLFRWNEGERKYEILRDGLIFFCCLFLKRGQAERFLNELRFFKRTDEEGRIKRTIFTKYCTRESHKHIGIEEQDFLIFQDIIGDLNRVPKVCDGVVDLSKENERYIKNRETSNESDENKARYRLLIREKDKFPYYLMRYIVDFGVLPCITFKQNDYSTKEGRGQFHYQDAAVAQEERCYNFVVRNGNVYYSYMPQAQNVVRISELQGTISVEELRNMVYASINGKDVNKSVEQYLYHLHLLYEKILTISGQTIKEGRVDVEDYRPLLDKLLLRPASNGEELRRELRKLLPKRVCDLLSNRFDCSEGVSAVEKRLKAILLRHEQLLLSQNPALHIDKIKSVIDYLYLFFSDDEKFRQQPTEKAHRGLKDEEFQMYHYLVGDYDSHPLALWKELEASGRLKPEMRKLTSATSLHGLYMLCLKGTVEWCRKQLMSIGKGTAKVEAIADRVGLKLYDKLKEYTPEQLEREVKLVVMHGYAAAATPKPKAQAAIPSKLTELRFYSFLGKREMSFAAFIRQDKKAQKLWLRNFYTVENIKTLQKRQAAADAACKKLYNLVGEVERVHTNDKVLVLVAQRYRERLLNVGSKCAVTLDNPERQQKLADVYEVQNAWLSIRFDDLDFTLTHVNLSNLRKAYNLIPRKHILAFKEYLDNRVKQKLCEECRNVRRKEDLCTCCSPRYSNLTSWLKENHSESSIEREAATMMLLDVERKLLSFLLDERRKAIIEYGKFIPFSALVKECRLADAGLCGIRNDVLHDNVISYADAIGKLSAYFPKEASEAVEYIRRTKEVREQRREELMANSSQ

SEQ ID NO: 73 - protein, 1322 aa, Prevotella sp.
MSKECKKQRQEKKRRLQKANFSISLTGKHVFGAYFNMARTNFVKTINYILPIAGVRGNYSENQINKMLHALFLIQAGRNEELTTEQKQWEKKLRLNPEQQTKFQKLLFKHFPVLGPMMADVADHKAYLNKKKSTVQTEDETFAMLKGVSLADCLDIICLMADTLTECRNFYTHKDPYNKPSQLADQYLHQEMIAKKLDKVVVASRRILKDREGLSVNEVEFLTGIDHLHQEVLKDEFGNAKVKDGKVMKTFVEYDDFYFKISGKRLVNGYTVTTKDDKPVNVNTMLPALSDFGLLYFCVLFLSKPYAKLFIDEVRLFEYSPFDDKENMIMSEMLSIYRIRTPRLHKIDSHDSKATLAMDIFGELRRCPMELYNLLDKNAGQPFFHDEVKHPNSHTPDVSKRLRYDDRFPTLALRYIDETELFKRIRFQLQLGSFRYKFYDKENCIDGRVRVRRIQKEINGYGRMQEVADKRMDKWGDLIQKREERSVKLEHEELYINLDQFLEDTADSTPYVTDRRPAYNIHANRIGLYWEDSQNPKQYKVFDENGMYIPELVVTEDKKAPIKMPAPRCALSVYDLPAMLFYEYLREQQDNEFPSAEQVIIEYEDDYRKFFKAVAEGKLKPFKRPKEFRDFLKKEYPKLRMADIPKKLQLFLCSHGLCYNNKPETVYERLDRLTLQHLEERELHIQNRLEHYQKDRDMIGNKDNQYGKKSFSDVRHGALARYLAQSMMEWQPTKLKDKEKGHDKLTGLNYNVLTAYLATYGHPQVPEEGFTPRTLEQVLINAHLIGGSNPHPFINKVLALGNRNIEELYLHYLEEELKHIRSRIQSLSSNPSDKALSALPFIHHDRMRYHERTSEEMMALAARYTTIQLPDGLFTPYILEILQKHYTENSDLQNALSQDVPVKLNPTCNAAYLITLFYQTVLKDNAQPFYLSDKTYTRNKDGEKAESFSFKRAYELFSVLNNNKKDTFPFEMIPLFLTSDEIQERLSAKLLDGDGNPVPEVGEKGKPATDSQGNTIWKRRIYSEVDDYAEKLTDRDMKISFKGEWEKLPRWKQDKIIKRRDETRRQMRDELLQRMPRYIRDIKDNERTLRRYKTQDMVLFLLAEKMFTNIISEQSSEFNWKQMRLSKVCNEAFLRQTLTFRVPVTVGETTIYVEQENMSLKNYGEFYRFLTDDRLMSLLNNIVETLKPNENGDLVIRHTDLMSELAAYDQYRSTIFMLIQSIENLIITNNAVLDDPDADGFWVREDLPKRNNFASLLELINQLNNVELTDDERKLLVAIRNAFSHNSYNIDFSLIKDVKHLPEVAKGILQHLQSMLGVEITK

SEQ ID NO: 74 - protein, 1322 aa, Prevotella sp.; identical to SEQ ID NO: 73

SEQ ID NO: 75 - protein, 1095 aa, Riemerella anatipestifer
MEKPLLPNVYTLKHKFFWGAFLNIARHNAFITICHINEQLGLKTPSNDDKIVDVVCETWNNILNNDHDLLKKSQLTELILKHFPFLTAMCYHPPKKEGKKKGHQKEQQKEKESEAQSQAEALNPSKLIEALEILVNQLHSLRNYYSHYKHKKPDAEKDIFKHLYKAFDASLRMVKEDYKAHFTVNLTRDFAHLNRKGKNKQDNPDFNRYRFEKDGFFTESGLLFFTNLFLDKRDAYWMLKKVSGFKASHKQREKMTTEVFCRSRILLPKLRLESRYDHNQMLLDMLSELSRCPKLLYEKLSEENKKHFQVEADGFLDEIEEEQNPFKDTLIRHQDRFPYFALRYLDLNESFKSIRFQVDLGTYHYCIYDKKIGDEQEKRHLTRTLLSFGRLQDFTEINRPQEWKALTKDLDYKETSNQPFISKTTPHYHITDNKIGFRLGTSKELYPSLEIKDGANRIAKYPYNSGFVAHAFISVHELLPLMFYQHLTGKSEDLLKETVRHIQRIYKDFEEERINTIEDLEKANQGRLPLGAFPKQMLGLLQNKQPDLSEKAKIKIEKLIAETKLLSHRLNTKLKSSPKLGKRREKLIKTGVLADWLVKDFMRFQPVAYDAQNQPIKSSKANSTEFWFIRRALALYGGEKNRLEGYFKQTNLIGNTNPHPFLNKFNWKACRNLVDFYQQYLEQREKFLEAIKNQPWEPYQYCLLLKIPKENRKNLVKGWEQGGISLPRGLFTEAIRETLSEDLMLSKPIRKEIKKHGRVGFISRAITLYFKEKYQDKHQSFYNLSYKLEAKAPLLKREEHYEYWQQNKPQSPTESQRLELHTSDRWKDYLLYKRWQHLEKKLRLYRNQDVMLWLMTLELTKNHFKELNLNYHQLKLENLAVNVQEADAKLNPLNQTLPMVLPVKVYPATAFGEVQYHKTPIRTVYIREEHTKALKMGNFKALVKDRRLNGLFSFIKEENDTQKHPISQLRLRRELEIYQSLRVDAFKETLSLEEKLLNKHTSLSSLENEFRALLEEWKKEYAASSMVTDEHIAFIASVRNAFCHNQYPFYKEALHAPIPLFTVAQPTTEEKDGLGIAEALLKVLREYCEIVKSQI

SEQ ID NO: 76 - protein, 1124 aa, Prevotella aurantiaca
MEDDKKTTGSISYELKDKHFWAAFLNLARHNVYITINHINKLLEIREIDNDEKVLDIKTLWQKGNKDLNQKARLRELMTKHFPFLETAIYTKNKEDKKEVKQEKQAEAQSLESLKDCLFLFLDKLQEARNYYSHYKYSEFSKEPEFEEGLLEKMYNIFGNNIQLVINDYQHNKDINPDEDFKHLDRKGQFKYSFADNEGNITESGLLFFVSLFLEKKDAIWMQQKLNGFKDNLENKKKMTHEVFCRSRILMPKLRLESTQTQDWILLDMLNELIRCPKSLYERLQGDDREKFKVPFDPADEDYNAEQEPFKNTLIRHQDRFPYFVLRYFDYNEIFKNLRFQIDLGTYHFSIYKKLIGGQKEDRHLTHKLYGFERIQEFAKQNRPDEWKAIVKDLDTYETSNKRYISETTPHYHLENQKIGIRFRNGNKEIWPSLKTNDENNEKSKYKLDKQYQAEAFLSVHELLPMMFYYLLLKKEKPNNDEINASIVEGFIKREIRNIFKLYDAFANGEINNIDDLEKYCADKGIPKRHLPKQMVAILYDEHKDMVKEAKRKQKEMVKDTKKLLATLEKQTQKEKEDDGRNVKLLKSGEIARWLVNDMMRFQPVQKDNEGKPLNNSKANSTEYQMLQRSLALYNNEEKPTRYFRQVNLIESNNPHPFLKWTKWEECNNILTFYYSYLTKKIEFLNKLKPEDWKKNQYFLKLKEPKTNRETLVQGWKNGFNLPRGIFTEPIREWFKRHQNNSKEYEKVEALDRVGLVTKVIPLFFKEEYFKDKEENFKEDTQKEINDCVQPFYNFPYNVGNIHKPKEKDFLHREERIELWDKKKDKFKGYKEKIKSKKLTEKDKEEFRSYLEFQSWNKFERELRLVRNQDIVTWLLCKELIDKLKIDELNIEELKKLRLNNIDTDTAKKEKNNILNRVMPMELPVTVYEIDDSHKIVKDKPLHTIYIKEAETKLLKQGNFKALVKDRRLNGLFSFVKTNSEAESKRNPISKLRVEYELGEYQEARIEIIQDMLALEEKLINKYKDLPTNKFSEMLNSWLEGKDEADKARFQNDVDFLIAVRNAFSHNQYPMHNKIEFANIKPFSLYTANNSEEKGLGIANQLKDKTKETTDKIKKIEKPIETKE

SEQ ID NO: 77 - protein, 1151 aa, Prevotella saccharolytica
MEDKPFWAAFFNLARHNVYLTVNHINKLLDLEKLYDEGKHKEIFEREDIFNISDDVMNDANSNGKKRKLDIKKIWDDLDTDLTRKYQLRELILKHFPFIQPAIIGAQTKERTTIDKDKRSTSTSNDSLKQTGEGDINDLLSLSNVKSMFFRLLQILEQLRNYYSHVKHSKSATMPNFDEDLLNWMRYIFIDSVNKVKEDYSSNSVIDPNTSFSHLIYKDEQGKIKPCRYPFTSKDGSINAFGLLFFVSLFLEKQDSIWMQKKIPGFKKASENYMKMTNEVFCRNHILLPKIRLETVYDKDWMLLDMLNEVVRCPLSLYKRLTPAAQNKFKVPEKSSDNANRQEDDNPFSRILVRHQNRFPYFVLRFFDLNEVFTTLRFQINLGCYHFAICKKQIGDKKEVHHLIRTLYGFSRLQNFTQNTRPEEWNTLVKTTEPSSGNDGKTVQGVPLPYISYTIPHYQIENEKIGIKIFDGDTAVDTDIWPSVSTEKQLNKPDKYTLTPGFKADVFLSVHELLPMMFYYQLLLCEGMLKTDAGNAVEKVLIDTRNAIFNLYDAFVQEKINTITDLENYLQDKPILIGHLPKQMIDLLKGHQRDMLKAVEQKKAMLIKDTERRLKLLDKQLKQETDVAAKNTGTLLKNGQIADWLVNDMMRFQPVKRDKEGNPINCSKANSTEYQMLQRAFAFYATDSCRLSRYFTQLHLIHSDNSHLFLSRFEYDKQPNLIAFYAAYLKAKLEFLNELQPQNWASDNYFLLLRAPKNDRQKLAEGWKNGFNLPRGLFTEKIKTWFNEHKTIVDISDCDIFKNRVGQVARLIPVFFDKKFKDHSQPFYRYDFNVGNVSKPTEANYLSKGKREELFKSYQNKFKNNIPAEKTKEYREYKNFSLWKKFERELRLIKNQDILIWLMCKNLFDEKIKPKKDILEPRIAVSYIKLDSLQTNTSTAGSLNALAKVVPMTLAIHIDSPKPKGKAGNNEKENKEFTVYIKEEGTKLLKWGNFKTLLADRRIKGLFSYIEHDDIDLKQHPLTKRRVDLELDLYQTCRIDIFQQTLGLEAQLLDKYSDLNTDNFYQMLIGWRKKEGIPRNIKEDTDFLKDVRNAFSHNQYPDSKKIAFRRIRKFNPKELILEEEEGLGIATQMYKEVEKVVNRIKRIELFD

SEQ ID NO: 78 - protein, 1159 aa, Myroides odoratimim
MKDILTTDTTEKQNRFYSHKIADKYFFGGYFNLASNNIYEVFEEVNKRNTFGKLAKRDNGNLKNYIIHVFKDELSISDFEKRVAIFASYFPILETVDKKSIKERNRTIDLTLSQRIRQFREMLISLVTAVDQLRNFYTHYHHSDIVIENKVLDFLNSSFVSTALHVKDKYLKTDKTKEFLKETIAAELDILIEAYKKKQIEKKNTRFKANKREDILNAIYNEAFWSFINDKDKDKDKETVVAKGADAYFEKNHHKSNDPDFALNISEKGIVYLLSFFLTNKEMDSLKANLTGFKGKVDRESGNSIKYMATQRIYSFHTYRGLKQKIRTSEEGVKETLLMQMIDELSKVPNVVYQHLSTTQQNSFIEDWNEYYKDYEDDVETDDLSRVIHPVIRKRYEDRFNYFAIRFLDEFFDFPTLRFQVHLGDYVHDRRTKQLGKVESDRIIKEKVTVFARLKDINSAKASYFHSLEEQDKEELDNKWTLFPNPSYDFPKEHTLQHQGEQKNAGKIGIYVKLRDTQYKEKAALEEARKSLNPKERSATKASKYDIITQIIEANDNVKSEKPLVFTGQPIAYLSMNDIHSMLFSLLTDNAELKKTPEEVEAKLIDQIGKQINEILSKDTDTKILKKYKDNDLKETDTDKITRDLARDKEEIEKLILEQKQRADDYNYTSSTKFNIDKSRKRKHLLFNAEKGKIGVWLANDIKRFMFKESKSKWKGYQHTELQKLFAYFDTSKSDLELILSNMVMVKDYPIELIDLVKKSRTLVDFLNKYLEARLEYIENVITRVKNSIGTPQFKTVRKECFTFLKKSNYTVVSLDKQVERILSMPLFIERGFMDDKPTMLEGKSYKQHKEKFADWFVHYKENSNYQNFYDTEVYEITTEDKREKAKVTKKIKQQQKNDVFTLMMVNYMLEEVLKLSSNDRLSLNELYQTKEERIVNKQVAKDTQERNKNYIWNKVVDLQLCDGLVHIDNVKLKDIGNFRKYENDSRVKEFLTYQSDIVWSAYLSNEVDSNKLYVIERQLDNYESIRSKELLKEVQEIECSVYNQVANKESLKQSGNENFKQYVLQGLLPIGMDVREMLILSTDVKFKKEEIIQLGQAGEVEQDLYSLIYIRNKFAHNQLPIKEFFDFCENNYRSISDNEYYAEYYMEIFRSIKEKYAN

SEQ ID NO: 79 - protein, 1120 aa, Prevotella intermedia
MEDDKKTTDSIRYELKDKHFWAAFLNLARHNVYITVNHINKILEEDEINRDGYENTLENSWNEIKDINKKDRLSKLIIKHFPFLEATTYRQNPTDTTKQKEEKQAEAQSLESLKKSFFVFIYKLRDLRNHYSHYKHSKSLERPKFEEDLQNKMYNIFDVSIQFVKEDYKHNTDINPKKDFKHLDRKRKGKFHYSFADNEGNITESGLLFFVSLFLEKKDAIWVQKKLEGFKCSNKSYQKMTNEVFCRSRMLLPKLRLESTQTQDWILLDMLNELIRCPKSLYERLQGVNRKKFYVSFDPADEDYDAEQEPFKNTLVRHQDRFPYFALRYFDYNEVFANLRFQIDLGTYHFSIYKKLIGGQKEDRHLTHKLYGFERIQEFDKQNRPDEWKAIVKDSDTFKKKEEKEEEKPYISETTPHYHLENKKIGIAFKNHNIWPSTQTELTNNKRKKYNLGTSIKAEAFLSVHELLPMMFYYLLLKTENTKNDNKVGGKKETKKQGKHKIEAIIESKIKDIYALYDAFANGEINSEDELKEYLKGKDIKIVHLPKQMIAILKNEHKDMAEKAEAKQEKMKLATENRLKTLDKQLKGKIQNGKRYNSAPKSGEIASWLVNDMMRFQPVQKDENGESLNNSKANSTEYQLLQRTLAFFGSEHERLAPYFKQTKLIESSNPHPFLNDTEWEKCSNILSFYRSYLKARKNFLESLKPEDWEKNQYFLMLKEPKTNRETLVQGWKNGFNLPRGFFTEPIRKWFMEHWKSIKVDDLKRVGLVAKVTPLFFSEKYKDSVQPFYNYPFNVGDVNKPKEEDFLHREERIELWDKKKDKFKGYKAKKKFKEMTDKEKEEHRSYLEFQSWNKFERELRLVRNQDIVTWLLCTELIDKLKIDELNIKELKKLRLKDINTDTAKKEKNNILNRVMPMELPVTVYKVNKGGYIIKNKPLHTIYIKEAETKLLKQGNFKALVKDRRLNGLFSFVKTPSEAESESNPISKLRVEYELGKYQNARLDIIEDMLALEKKLIDKYNSLDTDNFHNMLTGWLELKGEAKKARFQNDVKLLTAVRNAFSHNQYPMYDENLFGNIERFSLSSSNIIESKGLDIAAKLKEEVSKAAKKIQNEEDNKKEKET

SEQ ID NO: 80 - protein, 1199 aa, Capnocytophaga canimorsus
MKNIQRLGKGNEFSPFKKEDKFYFGGFLNLANNNIEDFFKEIITRFGIVITDENKKPKETFGEKILNEIFKKDISIVDYEKWVNIFADYFPFTKYLSLYLEEMQFKNRVICFRDVMKELLKTVEALRNFYTHYDHEPIKIEDRVFYFLDKVLLDVSLTVKNKYLKTDKTKEFLNQHIGEELKELCKQRKDYLVGKGKRIDKESEIINGIYNNAFKDFICKREKQDDKENHNSVEKILCNKEPQNKKQKSSATVWELCSKSSSKYTEKSFPNRENDKHCLEVPISQKGIVFLLSFFLNKGEIYALTSNIKGFKAKITKEEPVTYDKNSIRYMATHRMFSFLAYKGLKRKIRTSEINYNEDGQASSTYEKETLMLQMLDELNKVPDVVYQNLSEDVQKTFIEDWNEYLKENNGDVGTMEEEQVIHPVIRKRYEDKFNYFAIRFLDEFAQFPTLRFQVHLGNYLCDKRTKQICDTTTEREVKKKITVFGRLSELENKKAIFLNEREEIKGWEVFPNPSYDFPKENISVNYKDFPIVGSILDREKQPVSNKIGIRVKIADELQREIDKAIKEKKLRNPKNRKANQDEKQKERLVNEIVSTNSNEQGEPVVFIGQPTAYLSMNDIHSVLYEFLINKISGEALETKIVEKIETQIKQIIGKDATTKILKPYTNANSNSINREKLLRDLEQEQQILKTLLEEQQQREKDKKDKKSKRKHELYPSEKGKVAVWLANDIKRFMPKAFKEQWRGYHHSLLQKYLAYYEQSKEELKNLLPKEVFKHFPFKLKGYFQQQYLNQFYTDYLKRRLSYVNELLLNIQNFKNDKDALKATEKECFKFFRKQNYIINPINIQIQSILVYPIFLKRGFLDEKPTMIDREKFKENKDTELADWFMHYKNYKEDNYQKFYAYPLEKVEEKEKFKRNKQINKQKKNDVYTLMMVEYIIQKIFGDKFVEENPLVLKGIFQSKAERQQNNTHAATTQERNLNGILNQPKDIKIQGKITVKGVKLKDIGNFRKYEIDQRVNTFLDYEPRKEWMAYLPNDWKEKEKQGQLPPNNVIDRQISKYETVRSKILLKDVQELEKIISDEIKEEHRHDLKQGKYYNFKYYILNGLLRQLKNENVENYKVFKLNTNPEKVNITQLKQEATDLEQKAFVLTYIRNKFAHNQLPKKEFWDYCQEKYGKIEKEKTYAEYFAEVFKREKEALIK

SEQ ID NO: 81 - protein, 1175 aa, Porphyromonas gulae
MTEQSERPYNGTYYTLEDKHFWAAFLNLARHNAYITLTHIDRQLAYSKADITNDQDVLSFKALWKNFDNDLERKSRLRSLILKHFSFLEGAAYGKKLFESKSSGNKSSKNKELTKKEKEELQANALSLDNLKSILFDFLQKLKDFRNYYSHYRHSGSSELPLFDGNMLQRLYNVFDVSVQRVKIDHEHNDEVDPHYHFNHLVRKGKKDRYGHNDNPSFKHHFVDGEGMVTEAGLLFFVSLFLEKRDAIWMQKKIRGFKGGTETYQQMTNEVFCRSRISLPKLKLESLRMDDWMLLDMLNELVRCPKPLYDRLREDDRACFRVPVDILPDEDDTDGGGEDPFKNTLVRHQDRFPYFALRYFDLKKVFTSLRFHIDLGTYHFAIYKKMIGEQPEDRHLTRNLYGFGRIQDFAEEHRPEEWKRLVRDLDYFETGDKPYISQTSPHYHIEKGKIGLRFMPEGQHLWPSPEVGTTRTGRSKYAQDKRLTAEAFLSVHELMPMMFYYFLLREKYSEEVSAERVQGRIKRVIEDVYAVYDAFARDEINTRDELDACLADKGIRRGHLPRQMIAILSQEHKDMEEKIRKKLQEMMADTDHRLDMLDRQTDRKIRIGRKNAGLPKSGVIADWLVRDMMRFQPVAKDASGKPLNNSKANSTEYRMLQRALALFGGEKERLTPYFRQMNLTGGNNPHPFLHETRWESHTNILSFYRSYLRARKAFLERIGRSDRVENRPFLLLKEPKTDRQTLVAGWKGEFHLPRGIFTEAVRDCLIEMGHDEVASYKEVGFMAKAVPLYFERACEDRVQPFYDSPFNVGNSLKPKKGRFLSKEERAEEWERGKERFRDLEAWSYSAARRIEDAFAGIEYASPGNKKKIEQLLRDLSLWEAFESKLKVRADRINLAKLKKEILEAQEHPYHDFKSWQKFERELRLVKNQDIITWMMCRDLMEENKVEGLDTGTLYLKDIRPNVQEQGSLNVLNRVKPMRLPVVVYRADSRGHVHKEEAPLATVYIEERDTKLLKQGNFKSFVKDRRLNGLFSFVDTGGLAMEQYPISKLRVEYELAKYQTARVCVFELTLRLEESLLTRYPHLPDESFREMLESWSDPLLAKWPELHGKVRLLIAVRNAFSHNQYPMYDEAVFSSIRKYDPSSPDAIEERMGLNIAHRLSEEVKQAKETVERIIQA

SEQ ID NO: 82 - protein, 1090 aa, Prevotella sp.
MNIPALVENQKKYFGTYSVMAMLNAQTVLDHIQKVADIEGEQNENNENLWFHPVMSHLYNAKNGYDKQPEKTMFIIERLQSYFPFLKIMAENQREYSNGKYKQNRVEVNSNDIFEVLKRAFGVLKMYRDLTNHYKTYEEKLNDGCEFLTSTEQPLSGMINNYYTVALRNMNERYGYKTEDLAFIQDKRFKFVKDAYGKKKSQVNTGFFLSLQDYNGDTQKKLHLSGVGIALLICLFLDKQYINIFLSRLPIFSSYNAQSEERRIIIRSFGINSIKLPKDRIHSEKSNKSVAMDMLNEVKRCPDELFTTLSAEKQSRFRIISDDHNEVLMKRSSDRFVPLLLQYIDYGKLFDHIRFHVNMGKLRYLLKADKTCIDGQTRVRVIEQPLNGFGRLEEAETMRKQENGTFGNSGIRIRDFENMKRDDANPANYPYIVDTYTHYILENNKVEMFINDKEDSAPLLPVIEDDRYVVKTIPSCRMSTLEIPAMAFHMFLFGSKKTEKLIVDVHNRYKRLFQAMQKEEVTAENIASFGIAESDLPQKILDLISGNAHGKDVDAFIRLTVDDMLTDTERRIKRFKDDRKSIRSADNKMGKRGFKQISTGKLADFLAKDIVLFQPSVNDGENKITGLNYRIMQSAIAVYDSGDDYEAKQQFKLMFEKARLIGKGTTEPHPFLYKVFARSIPANAVEFYERYLIERKFYLTGLSNEIKKGNRVDVPFIRRDQNKWKTPAMKTLGRIYSEDLPVELPRQMFDNEIKSHLKSLPQMEGIDFNNANVTYLIAEYMKRVLDDDFQTFYQWNRNYRYMDMLKGEYDRKGSLQHCFTSVEEREGLWKERASRTERYRKQASNKIRSNRQMRNASSEEIETILDKRLSNSRNEYQKSEKVIRRYRVQDALLFLLAKKTLTELADFDGERFKLKEIMPDAEKGILSEIMPMSFTFEKGGKKYTITSEGMKLKNYGDFFVLASDKRIGNLLELVGSDIVSKEDIMEEFNKYDQCRPEISSIVFNLEKWAFDTYPELSARVDREEKVDFKSILKILLNNKNINKEQSDILRKIRNAFDHNNYPDKGVVEIKALPEIAMSIKKAFGEYAIMK

SEQ ID NO: 83 - protein, 1150 aa, Flavobacterium branchiophilum
MENLNKILDKENEICISKIFNTKGIAAPITEKALDNIKSKQKNDLNKEARLHYFSIGHSFKQIDTKKVFDYVLIEELKDEKPLKFITLQKDFFTKEFSIKLQKLINSIRNINNHYVHNFNDINLNKIDSNVFHFLKESFELAIIEKYYKVNKKYPLDNEIVLFLKELFIKDENTALLNYFTNLSKDEAIEYILTFTITENKIWNINNEHNILNIEKGKYLTFEAMLFLITIFLYKNEANHLLPKLYDFKNNKSKQELFTFFSKKFTSQDIDAEEGHLIKFRDMIQYLNHYPTAWNNDLKLESENKNKIMTTKLIDSIIEFELNSNYPSFATDIQFKKEAKAFLFASNKKRNQTSFSNKSYNEEIRHNPHIKQYRDEIASALTPISFNVKEDKFKIFVKKHVLEEYFPNSIGYEKFLEYNDFTEKEKEDFGLKLYSNPKTNKLIERIDNHKLVKSHGRNQDRFMDFSMRFLAENNYFGKDAFFKCYKFYDTQEQDEFLQSNENNDDVKFHKGKVTTYIKYEEHLKNYSYWDCPFVEENNSMSVKISIGSEEKILKIQRNLMIYFLENALYNENVENQGYKLVNNYYRELKKDVEESIASLDLIKSNPDFKSKYKKILPKRLLHNYAPAKQDKAPENAFETLLKKADFREEQYKKLLKKAEHEKNKEDFVKRNKGKQFKLHFIRKACQMMYFKEKYNTLKEGNAAFEKKDPVIEKRKNKEHEFGHHKNLNITREEFNDYCKWMFAFNGNDSYKKYLRDLFSEKHFFDNQEYKNLFESSVNLEAFYAKTKELFKKWIETNKPTNNENRYTLENYKNLILQKQVFINVYHFSKYLIDKNLLNSENNVIQYKSLENVEYLISDFYFQSKLSIDQYKTCGKLFNKLKSNKLEDCLLYEIAYNYIDKKNVHKIDIQKILTSKIILTINDANTPYKISVPFNKLERYTEMIAIKNQNNLKARFLIDLPLYLSKNKIKKGKDSAGYEIIIKNDLEIEDINTINNKIINDSVKFTEVLMELEKYFILKDKCILSKNYIDNSEIPSLKQFSKVWIKENENEIINYRNIACHFHLPLLETFDNLLLNVEQKFIKEELQNVSTINDLSKPQEYLILLFIKFKHNNFYLNLFNKNESKTIKNDKEVKKNRVLQKFINQVILKKK

SEQ ID NO: 84 - protein, 1159 aa, Myroides odoratimum
MKDILTTDTTEKQNRFYSHKIADKYFFGGYFNLASNNIYEVFEEVNKRNTFGKLAKRDNGNLKNYIIHVFKDELSISDFEKRVAIFASYFPILETVDKKSIKERNRTIDLTLSQRIRQFREMLISLVTAVDQLRNFYTHYHHSDIVIENKVLDFLNSSFVSTALHVKDKYLKTDKTKEFLKETIAAELDILIEAYKKKQIEKKNTRFKANKREDILNAIYNEAFWSFINDKDKDKDKETVVAKGADAYFEKNHHKSNDPDFALNISEKGIVYLLSFFLTNKEMDSLKANLTGFKGKVDRESGNSIKYMATQRIYSFHTYRGLKQKIRTSEEGVKETLLMQMIDELSKVPNVVYQHLSTTQQNSFIEDWNEYYKDYEDDVETDDLSRVTHPVIRKRYEDRFNYFAIRFLDEFFDFPTLRFQVHLGDYVHDRRTKQLGKVESDRIIKEKVTVFARLKDINSAKASYFHSLEEQDKEELDNKWTLFPNPSYDFPKEHTLQHQGEQKNAGKIGIYVKLRDTQYKEKAALEEARKSLNPKERSATKASKYDIITQIIEANDNVKSEKPLVFTGQPIAYLSMNDIHSMLFSLLTDNAELKKTPEEVEAKLIDQIGKQINEILSKDTDTKILKKYKDNDLKETDTDKITRDLARDKEEIEKLILEQKQRADDYNYTSSTKFNIDKSRKRKHLLFNAEKGKIGVWLANDIKRFMFKESKSKWKGYQHIELQKLFAYFDTSKSDLELILSNMVMVKDYPIELIDLVKKSRTLVDFLNKYLEARLEYIENVITRVKNSIGTPQFKTVRKECFTFLKKSNYTVVSLDKQVERILSMPLFIERGFMDDKPTMLEGKSYKQHKEKFADWFVHYKENSNYQNFYDTEVYEITTEDKREKAKVTKKIKQQQKNDVFTLMMVNYMLEEVLKLSSNDRLSLNELYQTKEERIVNKQVAKDTQERNKNYIWNKVVDLQLCDGLVHIDNVKLKDIGNFRKYENDSRVKEFLTYQSDIVWSAYLSNEVDSNKLYVIERQLDNYESIRSKELLKEVQEIECSVYNQVANKESLKQSGNENFKQYVLQGLLPIGMDVREMLILSTDVKFKKEEIIQLGQAGEVEQDLYSLIYIRNKFAHNQLPIKEFFDFCENNYRSISDNEYYAEYYMEIFRSIKEKYAN

SEQ ID NO: 85 - protein, 1214 aa, Flavobacterium columnare
MSSKNESYNKQKTFNHYKQEDKYFFGGFLNNADDNLRQVGKEFKTRINFNHNNNELASVFKDYFNKEKSVAKREHALNLLSNYFPVLERIQKHTNHNFEQTREIFELLLDTIKKLRDYYTHHYHKPITINPKIYDFLDDTLLDVLITIKKKKVKNDTSRELLKEKLRPELTQLKNQKREELIKKGKKLLEENLENAVFNHCLIPFLEENKTDDKQNKTVSLRKYRKSKPNEETSITLTQSGLVFLMSFFLHRKEFQVFTSGLERFKAKVNTIKEEEISLNKNNIVYMITHWSYSYYNFKGLKHRIKTDQGVSTLEQNNTTHSLTNTNTKEALLTQIVDYLSKVPNEIYETLSEKQQKEFEEDINEYMRENPENEDSTFSSIVSHKVIRKRYENKFNYFAMRFLDEYAELPTLRFMVNFGDYIKDRQKKILESIQFDSERIIKKEIHLFEKLSLVTEYKKNVYLKETSNIDLSRFPLFPNPSYVMANNNIPFYIDSRSNNLDEYLNQKKKAQSQNKKRNLTFEKYNKEQSKDAIIAMLQKEIGVKDLQQRSTIGLLSCNELPSMLYEVIVKDIKGAELENKIAQKIREQYQSIRDFTLDSPQKDNIPTTLIKTINTDSSVTFENQPIDIPRLKNALQKELTLTQEKLLNVKEHEIEVDNYNRNKNTYKFKNQPKNKVDDKKLQRKYVFYRNEIRQEANWLASDLIHFMKNKSLWKGYMHNELQSFLAFFEDKKNDCIALLETVFNLKEDCILTKGLKNLFLKHGNFIDFYKEYLKLKEDFLSTESTFLENGFIGLPPKILKKELSKRLKYIFIVFQKRQFIIKELEEKKNNLYADAINLSRGIFDEKPTMIPFKKPNPDEFASWFVASYQYNNYQSFYELTPDIVERDKKKKYKNLRAINKVKIQDYYLKLMVDTLYQDLFNQPLDKSLSDFYVSKAEREKIKADAKAYQKLNDSSLWNKVIHLSLQNNRITANPKLKDIGKYKRALQDEKIATLLTYDARTWTYALQKPEKENENDYKELHYTALNMELQEYEKVRSKELLKQVQELEKKILDKFYDFSNNASHPEDLEIEDKKGKRHPNFKLYITKALLKNESEIINLENIDIEILLKYYDYNTEELKEKIKNMDEDEKAKIINTKENYNKITNVLIKKALVLIIIRNKMAHNQYPPKFIYDLANRFVPKKEEEYFATYFNRVFETITKELWENKEKKDKTQV

SEQ ID NO: 86 - protein, 1119 aa, Porphymonas gingivalis
MTEQNEKPYNGTYYTLEDKHFWAAFLNLARHNAYITLAHIDRQLAYSKADITNDEDILFFKGQWKNLDNDLERKARLRSLILKHFSFLEGAAYGKKLFESQSSGNKSSKKKELSKKEKEELQANALSLDNLKSILFDFLQKLKDFRNYYSHYRHPESSELPLFDGNMLQRLYNVFDVSVQRVKRDHEHNDKVDPHRHFNHLVRKGKKDKYGNNDNPFFKHHFVDREGTVTEAGLLFFVSLFLEKRDAIWMQKKIRGFKGGTEAYQQMTNEVFCRSRISLPKLKLESLRTDDWMLLDMLNELVRCPKSLYDRLREEDRARFRVPVDILSDEDDTDGTEEDPFKNTLVRHQDRFPYFALRYFDLKKVFTSLRFHIDLGTYHFAIYKKNIGEQPEDRHLTRNLYGFGRIQDFAEEHRPEEWKRLVRDLDYFETGDKPYITQTTPHYHIEKGKIGLRFVPEGQHLWPSPEVGATRTGRSKYAQDKRLTAEAFLSVHELMPMMFYYFLLREKYSEEVSAEKVQGRIKRVIEDVYAVYDAFARDEINTRDELDACLADKGIRRGHLPRQMIAILSQEHKDMEEKVRKKLQEMIADTDHRLDMLDRQTDRKIRIGRKNAGLPKSGVVADWLVRDMMRFQPVAKDTSGKPLNNSKANSTEYRMLQRALALFGGEKERLTPYFRQMNLTGGNNPHPFLHETRWESHTNILSFYRSYLEARKAFLQSIGRSDRVENHRFLLLKEPKTDRQTLVAGWKGEFHLPRGIFTEAVRDCLIEMGYDEVGSYKEVGFMAKAVPLYFERASKDRVQPFYDYPFNVGNSLKPKKGRFLSKEKRAEEWESGKERFRLAKLKKEILEAKEHPYHDFKSWQKFERELRLVKNQDIITWMMCRDLMEENKVEGLDTGTLYLKDIRTDVQEQGSLNVLNRVKPMRLPVVVYRADSRGHVHKEQAPLATVYIEERDTKLLKQGNFKSFVKDRRLNGLFSFVDTGALAMEQYPISKLRVEYELAKYQTARVCAFEQTLELEESLLTRYPHLPDKNFRKMLESWSDPLLDKWPDLHGNVRLLIAVRNAFSHNQYPMYDETLFSSIRKYDPSSPDAIEERMGLNIAHRLSEEVKQAKEMVERIIQA

SEQ ID NO: 87 - protein, 1175 aa, Porphyromonas sp.
MTEQSERPYNGTYYTLEDKHFWAAFLNLARHNAYITLTHIDRQLAYSKADITNDQDVLSFKALWKNFDNDLERKSRLRSLILKHFSFLEGAAYGKKLFESKSSGNKSSKNKELTKKEKEELQANALSLDNLKSILFDFLQKLKDFRNYYSHYRHSESSELPLFDGNMLQRLYNVFDVSVQRVKRDHEHNDKVDPHRHFNHLVRKGKKDRYGHNDNPSFKHHFVDSEGMVTEAGLLFFVSLFLEKRDAIWMQKKIRGFKGGTETYQQMTNEVFCRSRISLPKLKLESLRTDDWMLLDMLNELVRCPKPLYDRLREDDRACFRVPVDILPDEDDTDGGGEDPFKNTLVRHQDRFPYFALRYFDLKKVFTSLRFHIDLGTYHFAIYKKMIGEQPEDRHLTRNLYGFGRIQDFAEEHRPEEWKRLVRDLDYFETGDKPYISQTTPHYHIEKGKIGLRFVPEGQHLWPSPEVGTTRTGRSKYAQDKRLTAEAFLSVHELMPMMFYYFLLREKYSEEVSAEKVQGRIKRVIEDVYAIYDAFARDEINTLKELDACLADKGIRRGHLPKQMIGILSQERKDMEEKVRKKLQEMIADTDHRLDMLDRQTDRKIRIGRKNAGLPKSGVIADWLVRDMMRFQPVAKDTSGKPLNNSKANSTEYRMLQRALALFGGEKERLTPYFRQMNLTGGNNPHPFLHETRWESHTNILSFYRSYLRARKAFLERIGRSDRVENCPFLLLKEPKTDRQTLVAGWKGEFHLPRGIFTEAVRDCLIEMGYDEVGSYREVGFMAKAVPLYFERACEDRVQPFYDSPFNVGNSLKPKKGRFLSKEDRAEEWERGKERFRDLEAWSHSAARRIKDAFAGIEYASPGNKKKIEQLLRDLSLWEAFESKLKVRADKINLAKLKKEILEAQEHPYHDFKSWQKFERELRLVKNQDIITWMMCRDLMEENKVEGLDTGTLYLKDIRPNVQEQGSLNVLNRVKPMRLPVVVYRADSRGHVHKEEAPLATVYIEERDTKLLKQGNFKSFVKDRRLNGLFSFVDTGGLAMEQYPISKLRVEYELAKYQTARVCVFELTLRLEESLLSRYPHLPDESFREMLESWSDPLLAKWPELHGKVRLLIAVRNAFSHNQYPMYDEAVFSSIRKYDPSSPDAIEERMGLNIAHRLSEEVKQAKETVERIIQA

SEQ ID NO: 88 - protein, 1132 aa, Prevotella intermedia
MEDDKKTKESTNMLDNKHFWAAFLNLARHNVYITVNHINKVLELKNKKDQDIIIDNDQDILAIKTHWEKVNGDLNKTERLRELMTKHFPFLETAIYTKNKEDKEEVKQEKQAKAQSFDSLKHCLFLFLEKLQEARNYYSHYKYSESTKEPMLEKELLKKMYNIFDDNIQLVIKDYQHNKDINPDEDFKHLDRTEEEFNYYFTTNKKGNITASGLLFFVSLFLEKKDAIWMQQKLRGFKDNRESKKKMTHEVFCRSRMLLPKLRLESTQTQDWILLDMLNELIRCPKSLYERLQGEYRKKFNVPFDSADEDYDAEQEPFKNTLVRHQDRFPYFALRYFDYNEIFTNLRFQIDLGTYHFSIYKKLIGGQKEDRHLTHKLYGFERIQEFAKQNRTDEWKAIVKDFDTYETSEEPYISETAPHYHLENQKIGIRFRNDNDEIWPSLKTNGENNEKRKYKLDKQYQAEAFLSVHELLPMMFYYLLLKKEEPNNDKKNASIVEGFIKREIRDIYKLYDAFANGEINNIDDLEKYCEDKGIPKRHLPKQMVAILYDEHKDMAEEAKRKQKEMVKDTKKLLATLEKQTQGEIEDGGRNIRLLKSGEIARWLVNDMMRFQPVQKDNEGNPLNNSKANSTEYQMLQRSLALYNKEEKPTRYFRQVNLINSSNPHPFLKWTKWEECNNILSFYRSYLTKKIEFLNKLKPEDWEKNQYFLKLKEPKTNRETLVQGWKNGFNLPRGIFTEPIREWFKRHQNDSEEYEKVETLDRVGLVTKVIPLFFKKEDSKDKEEYLKKDAQKEINNCVQPFYGFPYNVGNIHKPDEKDFLPSEERKKLWGDKKYKFKGYKAKVKSKKLTDKEKEEYRSYLEFQSWNKFERELRLVRNQDIVTWLLCTELIDKLKVEGLNVEELKKLRLKDIDTDTAKQEKNNILNRVMPMQLPVTVYEIDDSHNIVKDRPLHTVYIEETKTKLLKQGNFKALVKDRRLNGLFSFVDTSSETELKSNPISKSLVEYELGEYQNARIETIKDMLLLEETLIEKYKTLPTDNFSDMLNGWLEGKDEADKARFQNDVKLLVAVRNAFSHNQYPMRNRIAFANINPFSLSSADTSEEKKLDIANQLKDKTHKIIKRIIEIEKPIETKE

SEQ ID NO: 89 - protein, 1134 aa, Prevotella intermedia
MKMEDDKKTKESTNMLDNKHFWAAFLNLARHNVYITVNHINKVLELKNKKDQDIIIDNDQDILAIKTHWEKVNGDLNKTERLRELMTKHFPFLETAIYTKNKEDKEEVKQEKQAKAQSFDSLKHCLFLFLEKLQEARNYYSHYKYSESTKEPMLEKELLKKMYNIFDDNIQLVIKDYQHNKDINPDEDFKHLDRTEEEFNYYFTTNKKGNITASGLLFFVSLFLEKKDAIWMQQKLRGFKDNRESKKKMTHEVFCRSRMLLPKLRLESTQTQDWILLDMLNELIRCPKSLYERLQGEYRKKFNVPFDSADEDYDAEQEPFKNTLVRHQDRFPYFALRYFDYNEIFTNLRFQIDLGTYHFSIYKKLIGGQKEDRHLTHKLYGFERIQEFAKQNRTDEWKAIVKDFDTYETSEEPYISETAPHYHLENQKIGIRFRNDNDEIWPSLKTNGENNEKRKYKLDKQYQAEAFLSVHELLPMMFYYLLLKKEEPNNDKKNASIVEGFIKREIRDIYKLYDAFANGEINNIDDLEKYCEDKGIPKRHLPKQMVAILYDEHKDMAEEAKRKQKEMVKDTKKLLATLEKQTQGEIEDGGRNIRLLKSGEIARWLVNDMMRFQPVQKDNEGNPLNNSKANSTEYQMLQRSLALYNKEEKPTRYFRQVNLINSSNPHPFLKWTKWEECNNILSFYRSYLTKKIEFLNKLKPEDWEKNQYFLKLKEPKTNRETLVQGWKNGFNLPRGIFTEPIREWFKRHQNDSEEYEKVETLDRVGLVTKVIPLFFKKEDSKDKEEYLKKDAQKEINNCVQPFYGFPYNVGNIHKPDEKDFLPSEERKKLWGDKKYKFKGYKAKVKSKKLTDKEKEEYRSYLEFQSWNKFERELRLVRNQDIVTWLLCTELIDKLKVEGLNVEELKKLRLKDIDTDTAKQEKNNILNRVMPMQLPVTVYEIDDSHNIVKDRPLHTVYIEETKTKLLKQGNFKALVKDRRLNGLFSFVDTSSETELKSNPISKSLVEYELGEYQNARIETIKDMLLLEETLIEKYKTLPTDNFSDMLNGWLEGKDEADKARFQNDVKLLVAVRNAFSHNQYPMRNRIAFANINPFSLSSADTSEEKKLDIANQLKDKTHKIIKRIIEIEKPIETKE

SEQ ID NO: 90 - protein, 1133 aa, Prevotella intermedia
MEDDKKTTDSISYELKDKHFWAAFLNLARHNVYITVNHINKVLELKNKKDQDIIIDNDQDILAIKTHWEKVNGDLNKTERLRELMTKHFPFLETAIYSKNKEDKEEVKQEKQAKAQSFDSLKHCLFLFLEKLQETRNYYSHYKYSESTKEPMLEKELLKKMYNIFDDNIQLVIKDYQHNKDINPDEDFKHLDRTEEDFNYYFTRNKKGNITESGLLFFVSLFLEKKDAIWMQQKLRGFKDNRESKKKMTHEVFCRSRMLLPKLRLESTQTQDWILLDMLNELIRCPKSLYERLQGEDREKFKVPFDPADEDYDAEQEPFKNTLVRHQDRFPYFALRYFDYNEIFTNLRFQIDLGTFHFSIYKKLIGGQKEDRHLTHKLYGFERIQEFAKQNRPDEWKAIVKDLDTYETSNERYISETTPHYHLENQKIGIRFRNDNDEIWPSLKTNGENNEKSKYKLDKQYQAEAFLSVHELLPMMFYYLLLKKEEPNNDKKNASIVEGFIKREIRDMYKLYDAFANGEINNIDDLEKYCEDKGIPKRHLPKQMVAILYDEHKDMVKEAKRKQRKMVKDTEKLLAALEKQTQEKTEDGGRNIRLLKSGEIARWLVNDMMRFQPVQKDNEGNPLNNSKANSTEYQMLQRSLALYNKEEKPTRYFRQVNLINSSNPHPFLKWTKWEECNNILSFYRSYLTKKIEFLNKLKPEDWEKNQYFLKLKEPKTNRETLVQGWKNGFNLPRGIFTEPIREWFKRHQNDSKEYEKVEALDRVGLVTKVIPLFFKKEDSKDKEEDLKKDAQKEINNCVQPFYSFPYNVGNIHKPDEKDFLHREERIELWDKKKDKFKGYKAKVKSKKLTDKEKEEYRSYLEFQSWNKFERELRLVRNQDIVTWLLCTELIDKLKVEGLNVEELKKLRLKDIDTDTAKQEKNNILNRVMPMQLPVTVYEIDDSHNIVKDRPLHTVYIEETKTKLLKQGNFKALVKDRRLNGLFSFVDTSSEAELKSNPISKSLVEYELGEYQNARIETIKDMLLLEETLIEKYKNLPTDNFSDMLNGWLEGKDEADKARFQNDVKLLVAVRNAFSHNQYPMRNRIAFANINPFSLSSADTSEEKKLDIANQLKDKTHKIIKRIIEIEKPIETKE

SEQ ID NO: 91 - protein, 1127 aa, Prevotella buccae; identical to SEQ ID NO: 69

SEQ ID NO: 92 - protein, 1125 aa, Prevotella pallens
MKEEEKGKTPVVSTYNKDDKHFWAAFLNLARHNVYITVNHINKILGEGEINRDGYENTLEKSWNEIKDINKKDRLSKLIIKHFPFLEVTTYQRNSADTTKQKEEKQAEAQSLESLKKSFFVFIYKLRDLRNHYSHYKHSKSLERPKFEEDLQEKMYNIFDASIQLVKEDYKHNTDIKTEEDFKHLDRKGQFKYSFADNEGNITESGLLFFVSLFLEKKDAIWVQKKLEGFKCSNESYQKMTNEVFCRSRMLLPKLRLQSTQTQDWILLDMLNELIRCPKSLYERLREEDRKKFRVPIEIADEDYDAEQEPFKNALVRHQDRFPYFALRYFDYNEIFTNLRFQIDLGTYHFSIYKKQIGDYKESHHLTHKLYGFERIQEFTKQNRPDEWRKFVKTFNSFETSKEPYIPETTPHYHLENQKIGIRFRNDNDKIWPSLKTNSEKNEKSKYKLDKSFQAEAFLSVHELLPMMFYYLLLKTENTDNDNEIETKKKENKNDKQEKHKIEEIIENKITEIYALYDAFANGKINSIDKLEEYCKGKDIEIGHLPKQMIAILKSEHKDMATEAKRKQEEMLADVQKSLESLDNQINEEIENVERKNSSLKSGEIASWLVNDMMRFQPVQKDNEGNPLNNSKANSTEYQMLQRSLALYNKEEKPTRYFRQVNLIESSNPHPFLNNTEWEKCNNILSFYRSYLEAKKNFLESLKPEDWEKNQYFLMLKEPKTNCETLVQGWKNGFNLPRGIFTEPIRKWFMEHRKNITVAELKRVGLVAKVIPLFFSEEYKDSVQPFYNYLFNVGNINKPDEKNFLNCEERRELLRKKKDEFKKMTDKEKEENPSYLEFQSWNKFERELRLVRNQDIVTWLLCMELFNKKKIKELNVEKIYLKNINTNTTKKEKNTEEKNGEEKIIKEKNNILNRIMPMRLPIKVYGRENFSKNKKKKIRRNTFFTVYIEEKGTKLLKQGNFKALERDRRLGGLFSFVKTHSKAESKSNTISKSRVEYELGEYQKARIEIIKDMLALEETLIDKYNSLDTDNFHNMLTGWLKLKDEPDKASFQNDVDLLIAVRNAFSHNQYPMRNRIAFANINPFSLSSANTSEEKGLGIANQLKDKTHKTIEKIIEIEKPIETKE

SEQ ID NO: 93 - protein, 1157 aa, Myroides odoratimum
MKDILTTDTTEKQNRFYSHKIADKYFFGGYFNLASNNIYEVFEEVNKRNTFGKLAKRDNGNLKNYIIHVFKDELSISDFEKRVAIFASYFPILETVDKKSIKERNRTIDLTLSQRIRQFREMLISLVTAVDQLRNFYTHYHHSEIVIENKVLDFLNSSLVSTALHVKDKYLKTDKTKEFLKETIAAELDILIEAYKKKQIEKKNTRFKANKREDILNAIYNEAFWSFINDKDKDKETVVAKGADAYFEKNHHKSNDPDFALNISEKGIVYLLSFFLTNKEMDSLKANLTGFKGKVDRESGNSIKYMATQRIYSFHTYRGLKQKIRTSEEGVKETLLMQMIDELSKVPNVVYQHLSTTQQNSFIEDWNEYYKDYEDDVETDDLSRVIHPVIRKRYEDRFNYFAIRFLDEFFDFPTLRFQVHLGDYVHDRRTKQLGKVESDRIIKEKVTVFARLKDINSAKANYFHSLEEQDKEELDNKWTLFPNPSYDFPKEHTLQHQGEQKNAGKIGIYVKLRDTQYKEKAALEEARKSLNPKERSATKASKYDIITQIIEANDNVKSEKPLVFTGQPIAYLSMNDIHSMLFSLLTDNAELKKTPEEVEAKLIDQIGKQINEILSKDTDTKILKKYKDNDLKETDTDKITRDLARDKEEIEKLILEQKQRADDYNYTSSTKFNIDKSRKRKHLLFNAEKGKIGVWLANDIKRFMTEEFKSKWKGYQHTELQKLFAYYDTSKSDLDLILSDMVMVKDYPIELIALVKKSRTLVDFLNKYLEARLGYMENVITRVKNSIGTPQFKTVRKECFTFLKKSNYTVVSLDKQVERILSMPLFIERGFMDDKPTMLEGKSYQQHKEKFADWFVHYKENSNYQNFYDTEVYEITTEDKREKAKVTKKIKQQQKNDVFTLMMVNYMLEEVLKLSSNDRLSLNELYQTKEERIVNKQVAKDTQERNKNYIWNKVVDLQLCEGLVRIDKVKLKDIGNFRKYENDSRVKEFLTYQSDIVWSAYLSNEVDSNKLYVIERQLDNYESIRSKELLKEVQEIECSVYNQVANKESLKQSGNENFKQYVLQGLVPIGMDVREMLILSTDVKFIKEEIIQLGQAGEVEQDLYSLIYIRNKFAHNQLPIKEFFDFCENNYRSISDNEYYAEYYMEIFRSIKEKYTS

SEQ ID NO: 94 - protein, 1157 aa, Myroides odoratimum
MKDILTTDTTEKQNRFYSHKIADKYFFGGYFNLASNNIYEVFEEVNKRNTFGKLAKRDNGNLKNYIIHVFKDELSISDFEKRVAIFASYFPILETVDKKSIKERNRTIDLTLSQRIRQFREMLISLVTAVDQLRNFYTHYHHSEIVIENKVLDFLNSSLVSTALHVKDKYLKTDKTKEFLKETIAAELDILIEAYKKKQIEKKNTRFKANKREDILNAIYNEAFWSFINDKDKDKETVVAKGADAYFEKNHHKSNDPDFALNISEKGIVYLLSFFLTNKEMDSLKANLTGFKGKVDRESGNSIKYMATQRIYSFHTYRGLKQKIRTSEEGVKETLLMQMIDELSKVPNVVYQHLSTTQQNSFIEDWNEYYKDYEDDVETDDLSRVIHPVIRKRYEDRFNYFAIRFLDEFFDFPTLRFQVHLGDYVHDRRTKQLGKVESDRIIKEKVTVFARLKDINSAKASYFHSLEEQDKEELDNKWTLFPNPSYDFPKEHTLQHQGEQKNAGKIGIYVKLRDTQYKEKAALEEARKSLNPKERSATKASKYDIITQIIEANDNVKSEKPLVFTGQPIAYLSMNDIHSMLFSLLTDNAELKKTPEEVEAKLIDQIGKQINEILSKDTDTKILKKYKDNDLKETDTDKITRDLARDKEEIEKLILEQKQRADDYNYTSSTKFNIDKSRKRKHLLFNAEKGKIGVWLANDIKRFMFKESKSKWKGYQHTELQKLFAYFDTSKSDLELILSDMVMVKDYPIELIDLVRKSRTLVDFLNKYLEARLGYIENVITRVKNSIGTPQFKTVRKECFAFLKESNYTVASLDKQIERILSMPLFIERGFMDSKPTMLEGKSYQQHKEDFADWFVHYKENSNYQNFYDTEVYEIITEDKREQAKVTKKIKQQQKNDVFTLMMVNYMLEEVLKLPSNDRLSLNELYQTKEERIVNKQVAKDTQERNKNYIWNKVVDLQLCEGLVRIDKVKLKDIGNFRKYENDSRVKEFLTYQSDIVWSGYLSNEVDSNKLYVIERQLDNYESIRSKELLKEVQEIECIVYNQVANKESLKQSGNENFKQYVLQGLLPRGTDVREMLILSTDVKFKKEEIMQLGQVREVEQDLYSLIYIRNKFAHNQLPIKEFFDFCENNYRPISDNEYYAEYYMEIFRSIKEKYAS

SEQ ID NO: 95 - protein, 1224 aa, Bergeyella zoohelcum; identical to SEQ ID NO: 67

SEQ ID NO: 96 - protein, 1150 aa, Prevotella saccharolytica
MMEKENVQGSHIYYEPTDKCFWAAFYNLARHNAYLTIAHINSFVNSKKGINNDDKVLDIIDDWSKFDNDLLMGARLNKLILKHFPFLKAPLYQLAKRKTRKQQGKEQQDYEKKGDEDPEVIQEAIANAFKMANVRKTLHAFLKQLEDLRNHFSHYNYNSPAKKMEVKFDDGFCNKLYYVFDAALQMVKDDNRMNPEINMQTDFEHLVRLGRNRKIPNTFKYNFTNSDGTINNNGLLFFVSLFLEKRDAIWMQKKIKGFKGGTENYMRMTNEVFCRNRMVIPKLRLETDYDNHQLMFDMLNELVRCPLSLYKRLKQEDQDKFRVPIEFLDEDNEADNPYQENANSDENPTEETDPLKNTLVRHQHRFPYFVLRYFDLNEVFKQLRFQINLGCYHFSIYDKTIGERTEKRHLTRTLFGFDRLQNFSVKLQPEHWKNMVKHLDTEESSDKPYLSDAMPHYQIENEKIGIHFLKTDTEKKETVWPSLEVEEVSSNRNKYKSEKNLTADAFLSTHELLPMMFYYQLLSSEEKTRAAAGDKVQGVLQSYRKKIFDIYDDFANGTINSMQKLDERLAKDNLLRGNMPQQMLAILEHQEPDMEQKAKEKLDRLITETKKRIGKLEDQFKQKVRIGKRRADLPKVGSIADWLVNDMMRFQPAKRNADNTGVPDSKANSTEYRLLQEALAFYSAYKDRLEPYFRQVNLIGGTNPHPFLHRVDWKKCNHLLSFYHDYLEAKEQYLSHLSPADWQKHQHFLLLKVRKDIQNEKKDWKKSLVAGWKNGFNLPRGLFTESIKTWFSTDADKVQITDTKLFENRVGLIAKLIPLYYDKVYNDKPQPFYQYPFNINDRYKPEDTRKRFTAASSKLWNEKKMLYKNAQPDSSDKIEYPQYLDFLSWKKLERELRMLRNQDMMVWLMCKDLFAQCTVEGVEFADLKLSQLEVDVNVQDNLNVLNNVSSMILPLSVYPSDAQGNVLRNSKPLHTVYVQENNTKLLKQGNFKSLLKDRRLNGLFSFIAAEGEDLQQHPLTKNRLEYELSIYQTMRISVFEQTLQLEKAILTRNKTLCGNNFNNLLNSWSEHRTDKKTLQPDIDFLIAVRNAFSHNQYPMSTNTVMQGIEKFNIQTPKLEEKDGLGIASQLAKKTKDAASRLQNIINGGTN

SEQ ID NO: 97 - protein, 1175 aa, Porphyromonas gingivalis
MTEQNEKPYNGTYYTLEDKHFWAAFFNLARHNAYITLTHIDRQLAYSKADITNDEDILFFKGQWKNLDNDLERKARLRSLILKHFSFLEGAAYGKKLFESQSSGNKSSKKKELTKKEKEELQANALSLDNLKSILFDFLQKLKDFRNYYSHYRHPESSELPLFDGNMLQRLYNVFDVSVQRVKRDHEHNDKVDPHRHFNHLVRKGKKDRCGNNDNPFFKHHFVDREEKVTEAGLLFFVSLFLEKRDAIWMQKKIRGFKGGTETYQQMTNEVFCRSRISLPKLKLESLRTDDWMLLDMLNELVRCPKSLYDRLREEDRARFRVPVDILSDEDDTDGTEEDPFKNTLVRHQDRFPYFALRYFDLKKVFTSLRFHIDLGTYHFAIYKKNIGEQPEDRHLTRNLYGFGRIQDFAEEHRPEEWKRLVRDLDYFETGDKPYITQTTPHYHIEKGKIGLRFVPEGQLLWPSPEVGATRTGRSKYAQDKRFTAEAFLSVHELMPMMFYYFLLREKYSEEASAERVQGRIKRVIEDVYAVYDAFARGEIDTLDRLDACLADKGIRRGHLPRQMIAILSQEHKDMEEKVRKKLQEMIADTDHRLDMLDRQTDRKIRIGRKNAGLPKSGVIADWLVRDMMRFQPVAKDTSGKPLNNSKANSTEYRMLQRALALFGGEKERLTPYFRQMNLTGGNNPHPFLHETRWESHTNILSFYRSYLKARKAFLQSIGRSDRVENHRFLLLKEPKTDRQTLVAGWKGEFHLPRGIFTEAVRDCLIEMGLDEVGSYKEVGFMAKAVPLYFERACKDRVQPFYDYPFNVGNSLKPKKGRFLSKEKRAEEWESGKERFRDLEAWSHSAARRIEDAFAGIENASRENKKKIEQLLQDLSLWETFESKLKVKADKINIAKLKKEILEAKEHPYLDFKSWQKFERELRLVKNQDIITWMMCRDLMEENKVEGLDTGTLYLKDIRTDVHEQGSLNVLNRVKPMRLPVVVYRADSRGHVHKEQAPLATVYIEERDTKLLKQGNFKSFVKDRRLNGLFSFVDTGALAMEQYPISKLRVEYELAKYQTARVCAFEQTLELEESLLTRYPHLPDKNFRKMLESWSDPLLDKWPDLHGNVRLLIAVRNAFSHNQYPMYDETLFSSIRKYDPSSPDAIEERMGLNIAHRLSEEVKQAKEMVERIIQA

SEQ ID NO: 98 - protein, 1115 aa, Bacterioides pyogenes
MESIKNSQKSTGKTLQKDPPYFGLYLNMALLNVRKVENHIRKWLGDVALLPEKSGFHSLLTTDNLSSAKWTRFYYKSRKFLPFLEMFDSDKKSYENRRETTECLDTIDRQKISSLLKEVYGKLQDIRNAFSHYHIDDQSVKHTALIISSEMHRFIENAYSFALQKTRARFTGVFVETDFLQAEEKGDNKKFFAIGGNEGIKLKDNALIFLICLFLDREEAFKFLSRATGFKSTKEKGFLAVRETFCALCCRQPHERLLSVNPREALLMDMLNELNRCPDILFEMLDEKDQKSFLPLLGEEEQAHILENSLNDELCEAIDDPFEMIASLSKRVRYKNRFPYLMLRYIEEKNLLPFIRFRIDLGCLELASYPKKMGEENNYERSVTDHAMAFGRLTDFHNEDAVLQQITKGITDEVRFSLYAPRYAIYNNKIGFVRTGGSDKISFPTLKKKGGEGHCVAYTLQNTKSFGFISIYDLRKILLLSFLDKDKAKNIVSGLLEQCEKHWKDLSENLFDAIRTELQKEFPVPLIRYTLPRSKGGKLVSSKLADKQEKYESEFERRKEKLTEILSEKDFDLSQIPRRMIDEWLNVLPTSREKKLKGYVETLKLDCRERLRVFEKREKGEHPVPPRIGEMATDLAKDIIRMVIDQGVKQRITSAYYSEIQRCLAQYAGDDNRRHLDSIIRELRLKDTKNGHPFLGKVLRPGLGHTEKLYQRYFEEKKEWLEATFYPAASPKRVPRFVNPPTGKQKELPLIIRNLMKERPEWRDWKQRKNSHPIDLPSQLFENEICRLLKDKIGKEPSGKLKWNEMFKLYWDKEFPNGMQRFYRCKRRVEVFDKVVEYEYSEEGGNYKKYYEALIDEVVRQKISSSKEKSKLQVEDLTLSVRRVFKRAINEKEYQLRLLCEDDRLLFMAVRDLYDWKEAQLDLDKIDNMLGEPVSVSQVIQLEGGQPDAVIKAECKLKDVSKLMRYCYDGRVKGLMPYFANHEATQEQVEMELRHYEDHRRRVFNWVFALEKSVLKNEKLRRFYEESQGGCEHRRCIDALRKASLVSEEEYEFLVHIRNKSAHNQFPDLEIGKLPPNVTSGFCECIWSKYKAIICRIIPFIDPERRFFGKLLEQK

SEQ ID NO: 99 - protein, 1135 aa, Porphymonas gingivalis
MNTVPASENKGQSRTVEDDPQYFGLYLNLARENLIEVESHVRIKFGKKKLNEESLKQSLLCDHLLSVDRWTKVYGHSRRYLPFLHYFDPDSQIEKDHDSKTGVDPDSAQRLIRELYSLLDFLRNDFSHNRLDGTTFEHLEVSPDISSFITGTYSLACGRAQSRFADFFKPDDFVLAKNRKEQLISVADGKECLTVSGLAFFICLFLDREQASGMLSRIRGFKRTDENWARAVHETFCDLCIRHPHDRLESSNTKEALLLDMLNELNRCPRILYDMLPEEERAQFLPALDENSMNNLSENSLNEESRLLWDGSSDWAEALTKRIRHQDRFPYLMLRFIEEMDLLKGIRFRVDLGEIELDSYSKKVGRNGEYDRTITDHALAFGKLSDFQNEEEVSRMISGEASYPVRFSLFAPRYAIYDNKIGYCHTSDPVYPKSKTGEKRALSNPRSMGFISVHDLRKLLLMELLCEGSFSRMQSDFLRKANRILDETAEGKLQFSALFPEMRHRFIPPQNPKSKDRREKAETTLEKYKQEIKGRKDKLNSQLLSAFDMDQRQLPSRLLDEWMNIRPASHSVKLRTYVKQLNEDCRLRLQKFRKDGDGKARAIPLVGEMATFLSQDIVRMIISEETKKLITSAYYNEMQRSLAQYAGEENRHQFRAIVAELRLLDPSSGHPFLSATMETAHRYTEDFYKCYLEKKREWLAKTFYRPEQDENTKRRISVFFVPDGEARKLLPLLIRRRMKEQNDLQDWIRNKQAHPIDLPSHLFDSKIMELLKVKDGKKKWNEAFKDWWSTKYPDGMQPFYGLRRELNIHGKSVSYIPSDGKKFADCYTHLMEKTVQDKKRELRTAGKPVPPDLAADIKRSFHRAVNEREFMLRLVQEDDRLMLMAINKMMTDREEDILPGLKNIDSILDEENQFSLAVHAKVLEKEGEGGDNSLSLVPATIEIKSKRKDWSKYIRYRYDRRVPGLMSHFPEHKATLDEVKTLLGEYDRCRIKIFDWAFALEGAIMSDRDLKPYLHESSSREGKSGEHSTLVKMLVEKKGCLTPDESQYLILIRNKAAHNQFPCAAEMPLIYRDVSAKVGSIEGSSAKDLPEGSSLVDSLWKKYEMIIRKILPILDPENRFFGKLLNNMSQPINDL

SEQ ID NO: 100 - protein, 1135 aa, Porphyromonas gingivalis
MNTVPASENKGQSRTVEDDPQYFGLYLNLARENLIEVESHVRIKFGKKKLNEESLKQSLLCDHLLSVDRWTKVYGHSRRYLPFLHYFDPDSQIEKDHDSKTGVDPDSAQRLIRELYSLLDFLRNDFSHNRLDGTTFEHLEVSPDISSFITGTYSLACGRAQSRFADFFKPDDFVLAKNRKEQLISVADGKECLTVSGLAFFICLFLDREQASGMLSRIRGFKRTDENWARAVHETFCDLCIRHPHDRLESSNTKEALLLDMLNELNRCPRILYDMLPEEERAQFLPALDENSMNNLSENSLNEESRLLWDGSSDWAEALTKRIRHQDRFPYLMLRFIEEMDLLKGIRFRVDLGEIELDSYSKKVGRNGEYDRTITDHALAFGKLSDFQNEEEVSRMISGEASYPVRFSLFAPRYAIYDNKIGYCHTSDPVYPKSKTGEKRALSNPQSMGFISVHDLRKLLLMELLCEGSFSRMQSGFLRKANRILDETAEGKLQFSALFPEMRHRFIPPQNPKSKDRREKAETTLEKYKQEIKGRKDKLNSQLLSAFDMNQRQLPSRLLDEWMNIRPASHSVKLRTYVKQLNEDCRLRLRKFRKDGDGKARAIPLVGEMATFLSQDIVRMIISEETKKLITSAYYNEMQRSLAQYAGEENRRQFRAIVAELHLLDPSSGHPFLSATMETAHRYTEDFYKCYLEKKREWLAKTFYRPEQDENTKRRISVFFVPDGEARKLLPLLIRRRMKEQNDLQDWIRNKQAHPIDLPSHLFDSKIMELLKVKDGKKKWNEAFKDWWSTKYPDGMQPFYGLRRELNIHGKSVSYIPSDGKKFADCYTHLMEKTVQDKKRELRTAGKPVPPDLAADIKRSFHRAVNEREFMLRLVQEDDRLMLMAINKMMTDREEDILPGLKNIDSILDEENQFSLAVHAKVLEKEGEGGDNSLSLVPATIEIKSKRKDWSKYIRYRYDRRVPGLMSHFPEHKATLDEVKTLLGEYDRCRIKIFDWAFALEGAIMSDRDLKPYLHESSSREGKSGEHSTLVKMLVEKKGCLTPDESQYLILIRNKAAHNQFPCAAEMPLIYRDVSAKVGSIEGSSAKDLPEGSSLVDSLWKKYEMIIRKILPILDHENRFFGKLLNNMSQPINDL

SEQ ID NO: 101 - protein, 1135 aa, Porphyromonas gingivalis
MNTVPASENKGQSRTVEDDPQYFGLYLNLARENLIEVESHVRIKFGKKKLNEESLKQSLLCDHLLSVDRWTKVYGHSRRYLPFLHYFDPDSQIEKDHDSKTGVDPDSAQRLIRELYSLLDFLRNDFSHNRLDGTTFEHLEVSPDISSFITGTYSLACGRAQSRFADFFKPDDFVLAKNRKEQLISVADGKECLTVSGLAFFICLFLDREQASGMLSRIRGFKRTDENWARAVHETFCDLCIRHPHDRLESSNTKEALLLDMLNELNRCPRILYDMLPEEERAQFLPALDENSMNNLSENSLNEESRLLWDGSSDWAEALTKRIRHQDRFPYLMLRFIEEMDLLKGIRFRVDLGEIELDSYSKKVGRNGEYDRTITDHALAFGKLSDFQNEEEVSRMISGEASYPVRFSLFAPRYAIYDNKIGYCHTSDPVYPKSKTGEKRALSNPRSMGFISVHDLRKLLLMELLCEGSFSRMQSDFLRKANRILDETAEGKLQFSALFPEMRHRFIPPQNPKSKDRREKAETTLEKYKQEIKGRKDKLNSQLLSAFDMDQRQLPSRLLDEWMNIRPASHSVKLRTYVKQLNEDCRLRLQKFRKDGDGKARAIPLVGEMATFLSQDIVRMIISEETKKLITSAYYNEMQRSLAQYAGEENRHQFRAIVAELRLLDPSSGHPFLSATMETAHRYTEDFYKCYLEKKREWLAKTFYRPEQDENTKRRISVFFVPDGEARKLLPLLIRRRMKEQNDLQDWIRNKQAHPIDLPSHLFDSKVMELLKVKDGKKKWNEAFKDWWSTKYPDGMQPFYGLRRELNIHGKSVSYIPSDGKKFADCYTHLMEKTVRDKKRELRTAGKPVPPDLAAYIKRSFHRAVNEREFMLRLVQEDDRLMLMAINKIMTDREEDILPGLKNIDSILDKENQFSLAVHAKVLEKEGEGGDNSLSLVPATIEIKSKRKDWSKYIRYRYDRRVPGLMSHFPEHKATLDEVKTLLGEYDRCRIKIFDWAFALEGAIMSDRDLKPYLHESSSREGKSGEHSTLVKMLVEKKGCLTPDESQYLILIRNKAAHNQFPCAAEIPLIYRDVSAKVGSIEGSSAKDLPEGSSLVDSLWKKYEMIIRKILPILDPENRFFGKLLNNMSQPINDL

SEQ ID NO: 102 - protein, 1125 aa, Prevotella intermedia
MKMEDDKKTTESTNMLDNKHFWAAFLNLARHNVYITVNHINKVLELKNKKDQDIIIDNDQDILAIKTHWEKVNGDLNKTERLRELMTKHFPFLETAIYTKNKEDKEEVKQEKQAEAQSLESLKDCLFLFLEKLQEARNYYSHYKYSESTKEPMLEEGLLEKMYNIFDDNIQLVIKDYQHNKDINPDEDFKHLDRKGQFKYSFADNEGNITESGLLFFVSLFLEKKDAIWMQQKLTGFKDNRESKKKMTHEVFCRRRMLLPKLRLESTQTQDWILLDMLNELIRCPKSLYERLQGEYRKKFNVPFDSADEDYDAEQEPFKNTLVRHQDRFPYFALRYFDYNEIFTNLRFQIDLGTYHFSIYKKLIGGQKEDRHLTHKLYGFERIQEFAKQNRPDEWKALVKDLDTYETSNERYISETTPHYHLENQKIGIRFRNGNKEIWPSLKTNGENNEKSKYKLDKPYQAEAFLSVHELLPMMFYYLLLKKEEPNNDKKNASIVEGFIKREIRDMYKLYDAFANGEINNIGDLEKYCEDKGIPKRHLPKQMVAILYDEPKDMVKEAKRKQKEMVKDTKKLLATLEKQTQEEIEDGGRNIRLLKSGEIARWLVNDMMRFQPVQKDNEGNPLNNSKANSTEYQMLQRSLALYNKEEKPTRYFRQVNLINSSNPHPFLKWTKWEECNNILSFYRNYLTKKIEFLNKLKPEDWEKNQYFLKLKEPKTNRETLVQGWKNGFNLPRGIFTEPIREWFKRHQNDSKEYEKVEALKRVGLVTKVIPLFFKEEYFKEDAQKEINNCVQPFYSFPYNVGNIHKPDEKDFLPSEERKKLWGDKKDKFKGYKAKVKSKKLTDKEKEEYRSYLEFQSWNKFERELRLVRNQDIVTWLLCTELIDKMKVEGLNVEELQKLRLKDIDTDTAKQEKNNILNRIMPMQLPVTVYEIDDSHNIVKDRPLHTVYIEETKTKLLKQGNFKALVKDRRLNGLFSFVDTSSKAELKDKPISKSVVEYELGEYQNARIETIKDMLLLEKTLIKKYEKLPTDNFSDMLNGWLEGKDESDKARFQNDVKLLVAVRNAFSHNQYPMRNRIAFANINPFSLSSADISEEKKLDIANQLKDKTHKIIKKIIEIEKPIETKE

SEQ ID NO: 103 - protein, 1161 aa, Bacteroides bacterium
MENQTQKGKGIYYYYTKNEDKHYFGSFLNLANNNIEQIIEEFRIRLSLKDEKNIKEIINNYFTDKKSYTDWERGINILKEYLPVIDYLDLAITDKEFEKIDLKQKETAKRKYFRTNFSLLIDTIIDLRNFYTHYFHKPISINPDVAKFLDKNLLNVCLDIKKQKMKTDKTKQALKDGLDKELKKLIELKKAELKEKKIKTWNITENVEGAVYNDAFNHMVYKNNAGVTILKDYHKSILPDDKIDSELKLNFSISGLVFLLSMFLSKKEIEQFKSNLEGFKGKVIGENGEYEISKFNNSLKYMATHWIFSYLTFKGLKQRVKNTFDKETLLMQMIDELNKVPHEVYQTLSKEQQNEFLEDINEYVQDNEENKKSMENSIVVHPVIRKRYDDKFNYFAIRFLDEFANFPTLKFFVTAGNFVHDKREKQIQGSMLTSDRMIKEKINVFGKLTEIAKYKSDYFSNENTLETSEWELFPNPSYLLIQNNIPVHIDLIHNTEEAKQCQIAIDRIKCTTNPAKKRNTRKSKEEIIKIIYQKNKNIKYGDPTALLSSNELPALIYELLVNKKSGKELENIIVEKIVNQYKTIAGFEKGQNLSNSLITKKLKKSEPNEDKINAEKIILAINRELEITENKLNIIKNNRAEFRTGAKRKHIFYSKELGQEATWIAYDLKRFMPEASRKEWKGFHHSELQKFLAFYDRNKNDAKALLNMFWNFDNDQLIGNDLNSAFREFHFDKFYEKYLIKRDEILEGFKSFISNFKDEPKLLKKGIKDIYRVFDKRYYIIKSTNAQKEQLLSKPICLPRGIFDNKPTYIEGVKVESNSALFADWYQYTYSDKHEFQSFYDMPRDYKEQFEKFELNNIKSIQNKKNLNKSDKFIYFRYKQDLKIKQIKSQDLFIKLMVDELFNVVFKNNIELNLKKLYQTSDERFKNQLIADVQKNREKGDTSDNKMNENFIWNMTIPLSLCNGQIEEPKVKLKDIGKFRKLETDDKVIQLLEYDKSKVWKKLEIEDELENMPNSYERIRREKLLKGIQEFEHFLLEKEKFDGINHPKHFEQDLNPNFKTYVINGVLRKNSKLNYTEIDKLLDLEHISIKDIETSAKEIHLAYFLIHVRNKFGHNQLPKLEAFELMKKYYKKNNEETYAEYFHKVSSQIVNEFKNSLEKHS

SEQ ID NO: 104 - protein, 1165 aa, Chryseobacterium jejuense
MEKTQTGLGIYYDHTKLQDKYFFGGFFNLAQNNIDNVIKAFIIKFFPERKDKDINIAQFLDICFKDNDADSDFQKKNKFLRIHFPVIGFLTSDNDKAGFKKKFALLLKTISELRNFYTHYYHKSIEFPSELFELLDDIFVKTTSEIKKLKKKDDKTQQLLNKNLSEEYDIRYQQQIERLKELKAQGKRVSLTDETAIRNGVFNAAFNHLIYRDGENVKPSRLYQSSYSEPDPAENGISLSQNSILFLLSMFLERKETEDLKSRVKGFKAKIIKQGEEQISGLKFMATHWVFSYLCFKGIKQKLSTEFHEETLLIQIIDELSKVPDEVYSAFDSKTKEKFLEDINEYMKEGNADLSLEDSKVIHPVIRKRYENKFNYFAIRFLDEYLSSTSLKFQVHVGNYVHDRRVKHINGTGFQTERIVKDRIKVFGRLSNISNLKADYIKEQLELPNDSNGWEIFPNPSYIFIDNNVPIHVLADEATKKGIELFKDKRRKEQPEELQKRKGKISKYNIVSMIYKEAKGKDKLRIDEPLALLSLNEIPALLYQILEKGATPKDIELIIKNKLTERFEKIKNYDPETPAPASQISKRLRNNTTAKGQEALNAEKLSLLIEREIENTETKLSSIEEKRLKAKKEQRRNTPQRSIFSNSDLGRIAAWLADDIKRFMPAEQRKNWKGYQHSQLQQSLAYFEKRPQEAFLLLKEGWDTSDGSSYWNNWVMNSFLENNHFEKFYKNYLMKRVKYFSELAGNIKQHTHNTKFLRKFIKQQMPADLFPKRHYILKDLETEKNKVLSKPLVFSRGLFDNNPTFIKGVKVTENPELFAEWYSYGYKTEHVFQHFYGWERDYNELLDSELQKGNSFAKNSIYYNRESQLDLIKLKQDLKIKKIKIQDLFLKRIAEKLFENVFNYPTTLSLDEFYLTQEERAEKERIALAQSLREEGDNSPNIIKDDFIWSKTIAFRSKQIYEPAIKLKDIGKFNRFVLDDEESKASKLLSYDKNKIWNKEQLERELSIGENSYEVIRREKLFKEIQNLELQILSNWSWDGINHPREFEMEDQKNTRHPNFKMYLVNGILRKNINLYKEDEDFWLESLKENDFKTLPSEVLETKSEMVQLLFLVILIRNQFAHNQLPEIQFYNFIRKNYPEIQNNTVAELYLNLIKLAVQKLKDNS

SEQ ID NO: 105 - protein, 1156 aa, Chryseobacterium carnipullorum
MNTRVTGMGVSYDHTKKEDKHFFGGFLNLAQDNITAVIKAFCIKFDKNPMSSVQFAESCFTDKDSDTDFQNKVRYVRTHLPVIGYLNYGGDRNTFRQKLSTLLKAVDSLRNFYTHYYHSPLALSTELFELLDTVFASVAVEVKQHKMKDDKTRQLLSKSLAEELDIRYKQQLERLKELKEQGKNIDLRDEAGIRNGVLNAAFNHLIYKEGEIAKPTLSYSSFYYGADSAENGITISQSGLLFLLSMFLGKKEIEDLKSRIRGFKAKIVRDGEENISGLKFMATHWIFSYLSFKGMKQRLSTDFHEETLLIQIIDELSKVPDEVYHDFDTATREKFVEDINEYIREGNEDFSLGDSTIIHPVIRKRYENKFNYFAVRFLDEFIKFPSLRFQVHLGNFVHDRRIKDIHGTGFQTERVVKDRIKVFGKLSEISSLKTEYIEKELDLDSDTGWEIFPNPSYVFIDNNIPIYISTNKTFKNGSSEFIKLRRKEKPEEMKMRGEDKKEKRDIASMIGNAGSLNSKTPLAMLSLNEMPALLYEILVKKTTPEEIELIIKEKLDSHFENIKNYDPEKPLPASQISKRLRNNTTDKGKKVINPEKLIHLINKEIDATEAKFALLAKNRKELKEKFRGKPLRQTIFSNMELGREATWLADDIKRFMPDILRKNWKGYQHNQLQQSLAFFNSRPKEAFTILQDGWDFADGSSFWNGWIINSFVKNRSFEYFYEAYFEGRKEYFSSLAENIKQHTSNHRNLRRFIDQQMPKGLFENRHYLLENLETEKNKILSKPLVFPRGLFDTKPTFIKGIKVDEQPELFAEWYQYGYSTEHVFQNFYGWERDYNDLLESELEKDNDFSKNSIHYSRTSQLELIKLKQDLKIKKIKIQDLFLKLIAGHIFENIFKYPASFSLDELYLTQEERLNKEQEALIQSQRKEGDHSDNIIKDNFIGSKTVTYESKQISEPNVKLKDIGKFNRFLLDDKVKTLLSYNEDKVWNKNDLDLELSIGENSYEVIRREKLFKKIQNFELQTLTDWPWNGTDHPEEFGTTDNKGVNHPNFKMYVVNGILRKHTDWFKEGEDNWLENLNETHFKNLSFQELETKSKSIQTAFLIIMIRNQFAHNQLPAVQFFEFIQKKYPEIQGSTTSELYLNFINLAVVELLELLEK

SEQ ID NO: 106 - protein, 1036 aa, Chryseobacterium ureilyticum
METQILGNGISYDHTKTEDKHFFGGFLNTAQNNIDLLIKAYISKFESSPRKLNSVQFPDVCFKKNDSDADFQHKLQFIRKHLPVIQYLKYGGNREVLKEKFRLLLQAVDSLRNFYTHFYHKPIQLPNELLTLLDTIFGEIGNEVRQNKMKDDKTRHLLKKNLSEELDFRYQEQLERLRKLKSEGKKVDLRDTEAIRNGVLNAAFNHLIFKDAEDFKPTVSYSSYYYDSDTAENGISISQSGLLFLLSMFLGRREMEDLKSRVRGFKARIIKHEEQHVSGLKFMATHWVFSEFCFKGIKTRLNADYHEETLLIQLIDELSKVPDELYRSFDVATRERFIEDINEYIRDGKEDKSLIESKIVHPVIRKRYESKFNYFAIRFLDEFVNFPTLRFQVHAGNYVHDRRIKSIEGTGFKTERLVKDRIKVFGKLSTISSLKAEYLAKAVNITDDTGWELLPHPSYVFIDNNIPIHLTVDPSFKNGVKEYQEKRKLQKPEEMKNRQGGDKMHKPAISSKIGKSKDINPESPVALLSMNEIPALLYEILVKKASPEEVEAKIRQKLTAVFERIRDYDPKVPLPASQVSKRLRNNTDTLSYNKEKLVELANKEVEQTERKLALITKNRRECREKVKGKFKRQKVFKNAELGTEATWLANDIKRFMPEEQKKNWKGYQHSQLQQSLAFFESRPGEARSLLQAGWDFSDGSSFWNGWVMNSFARDNTFDGFYESYLNGRMKYFLRLADNIAQQSSTNKLISNFIKQQMPKGLFDRRLYMLEDLATEKNKILSKPLIFPRGIFDDKPTFKKGVQVSEEPEAFADWYSYGYDVKHKFQEFYAWDRDYEELLREELEKDTAFTKNSIHYSRESQIELLAKKQDLKVKKVRIQDLYLKLMAEFLFENVFGHELALPLDQFYLTQEERLKQEQEAIVQSQRPKGDDSPNIVKENFIWSKTIPFKSGRVFEPNVKLKDIGKFRNLLTDEKVDILLSYNNTEIGKQVIENELIIGAGSYEFIRREQLFKEIQQMKRLSLRSVRGMGVPIRLNLK

SEQ ID NO: 107 - protein, 1127 aa, Prevotella buccae
MQKQDKLFVDRKKNAIFAFPKYITIMENQEKPEPIYYELTDKHFWAAFLNLARHNVYTTINHINRRLEIAELKDDGYMMDIKGSWNEQAKKLDKKVRLRDLIMKHFPFLEAAAYEITNSKSPNNKEQREKEQSEALSLNNLKNVLFIFLEKLQVLRNYYSHYKYSEESPKPIFETSLLKNMYKVFDANVRLVKRDYMHHENIDMQRDFTHLNRKKQVGRTKNIIDSPNFHYHFADKEGNMTIAGLLFFVSLFLDKKDAIWMQKKLKGFKDGRNLREQMTNEVFCRSRISLPKLKLENVQTKDWMQLDMLNELVRCPKSLYERLREKDRESFKVPFDIFSDDYDAEEEPFKNTLVRHQDRFPYFVLRYFDLNEIFEQLRFQIDLGTYHFSIYNKRIGDEDEVRHLTHHLYGFARIQDFAQQNQPEVWRKLVKDLDYFEASQEPYIPKTAPHYHLENEKIGIKFCSTHNNLFPSLKTEKTCNGRSKFNLGTQFTAEAFLSVHELLPMMFYYLLLTKDYSRKESADKVEGIIRKEISNIYAIYDAFANGEINSIADLTCRLQKTNILQGHLPKQMISILEGRQKDMEKEAERKIGEMIDDTQRRLDLLCKQTNQKIRIGKRNAGLLKSGKIADWLVNDMMRFQPVQKDQNNIPINNSKANSTEYRMLQRALALFGSENFRLKAYFNQMNLVGNDNPHPFLAETQWEHQTNILSFYRNYLEARKKYLKGLKPQNWKQYQHFLILKVQKTNRNTLVTGWKNSFNLPRGIFTQPIREWFEKHNNSKRIYDQILSFDRVGFVAKAIPLYFAEEYKDNVQPFYDYPFNIGNKLKPQKGQFLDKKERVELWQKNKELFKNYPSEKKKTDLAYLDFLSWKKFERELRLIKNQDIVTWLMFKELFNMATVEGLKIGEIHLRDIDTNTANEESNNILNRIMPMKLPVKTYETDNKGNILKERPLATFYIEETETKVLKQGNFKVLAKDRRLNGLLSFAETTDIDLEKNPITKLSVDHELIKYQTTRISIFEMTLGLEKKLINKYPTLPTDSFRNMLERWLQCKANRPELKNYVNSLIAVRNAFSHNQYPMYDATLFAEVKKFTLFPSVDTKKIELNIAPQLLEIVGKAIKEIEKSENKN

SEQ ID NO: 108 - protein, 1135 aa, Porphyromonas gingivalis
MNTVPASENKGQSRTVEDDPQYFGLYLNLARENLIEVESHVRIKFGKKKLNEESLKQSLLCDHLLSVDRWTKVYGHSRRYLPFLHYFDPDSQIEKDHDSKTGVDPDSAQRLIRELYSLLDFLRNDFSHNRLDGTTFEHLEVSPDISSFITGTYSLACGRAQSRFADFFKPDDFVLAKNRKEQLISVADGKECLTVSGLAFFICLFLDREQASGMLSRIRGFKRTDENWARAVHETFCDLCIRHPHDRLESSNTKEALLLDMLNELNRCPRILYDMLPEEERAQFLPALDENSMNNLSENSLNEESRLLWDGSSDWAEALTKRIRHQDRFPYLMLRFIEEMDLLKGIRFRVDLGEIELDSYSKKVGRNGEYDRTITDHALAFGKLSDFQNEEEVSRMISGEASYPVRFSLFAPRYAIYDNKIGYCHTSDPVYPKSKTGEKRALSNPQSMGFISVHNLRKLLLMELLCEGSFSRMQSDFLRKANRILDETAEGKLQFSALFPEMRHRFIPPQNPKSKDRREKAETTLEKYKQEIKGRKDKLNSQLLSAFDMNQRQLPSRLLDEWMNIRPASHSVKLRTYVKQLNEDCRLRLRKFRKDGDGKARAIPLVGEMATFLSQDIVRMIISEETKKLITSAYYNEMQRSLAQYAGEENRRQFRAIVAELHLLDPSSGHPFLSATMETAHRYTEDFYKCYLEKKREWLAKTFYRPEQDENTKRRISVFFVPDGEARKLLPLLIRRRMKEQNDLQDWIRNKQAHPIDLPSHLFDSKIMELLKVKDGKKKWNEAFKDWWSTKYPDGMQPFYGLRRELNIHGKSVSYIPSDGKKFADCYTHLMEKTVQDKKRELRTAGKPVPPDLAADIKRSFHRAVNEREFMLRLVQEDDRLMLMAINKMMTDREEDILPGLKNIDSILDEENQFSLAVHAKVLEKEGEGGDNSLSLVPATIEIKSKRKDWSKYIRYRYDRRVPGLMSHFPEHKATLDEVKTLLGEYDRCRIKIFDWAFALEGAIMSDRDLKPYLHESSSREGKSGEHSTLVKMLVEKKGCLTPDESQYLILIRNKAAHNQFPCAAEMPLIYRDVSAKVGSIEGSSAKDLPEGSSLVDSLWKKYEMIIRKILPILDPENRFFGKLLNNMSQPINDL

SEQ ID NO: 109 - protein, 1175 aa, Porphyromonas gingivalis
MTEQNEKPYNGTYYTLEDKHFWAAFFNLARHNAYITLAHIDRQLAYSKADITNDEDILFFKGQWKNLDNDLERKARLRSLILKHFSFLEGAAYGKKLFESQSSGNKSSKKKELTKKEKEELQANALSLDNLKSILFDFLQKLKDFRNYYSHYRHPESSELPLFDGNMLQRLYNVFDVSVQRVKRDHEHNDKVDPHRHFNHLVRKGKKDKYGNNDNPFFKHHFVDREEKVTEAGLLFFVSLFLEKRDAIWMQKKIRGFKGGTEAYQQMTNEVFCRSRISLPKLKLESLRTDDWMLLDMLNELVRCPKSLYDRLREEDRARFRVPVDILSDEDDTDGTEEDPFKNTLVRHQDRFPYFALRYFDLKKVFTSLRFHIDLGTYHFAIYKKNIGEQPEDRHLTRNLYGFGRIQDFAEEHRPEEWKRLVRDLDYFETGDKPYITQTTPHYHIEKGKIGLRFVPEGQLLWPSPEVGATRTGRSKYAQDKRFTAEAFLSVHELMPMMFYYFLLREKYSEEASAEKVQGRIKRVIEDVYAVYDAFARDEINTRDELDACLADKGIRRGHLPRQMIAILSQEHKDMEEKVRKKLQEMIADTDHRLDMLDRQTDRKIRIGRKNAGLPKSGVIADWLVRDMMRFQPVAKDTSGKPLNNSKANSTEYRMLQRALALFGGEKERLTPYFRQMNLTGGNNPHPFLHETRWESHTNILSFYRSYLKARKAFLQSIGRSDREENHRFLLLKEPKTDRQTLVAGWKSEFHLPRGIFTEAVRDCLIEMGYDEVGSYKEVGFMAKAVPLYFERACKDRVQPFYDYPFNVGNSLKPKKGRFLSKEKRAEEWESGKERFRDLEAWSHSAARRIEDAFVGIEYASWENKKKIEQLLQDLSLWETFESKLKVKADKINIAKLKKEILEAKEHPYHDFKSWQKFERELRLVKNQDIITWMMCRDLMEENKVEGLDTGTLYLKDIRTDVQEQGSLNVLNHVKPMRLPVVVYRADSRGHVHKEEAPLATVYIEERDTKLLKQGNFKSFVKDRRLNGLFSFVDTGALAMEQYPISKLRVEYELAKYQTARVCAFEQTLELEESLLTRYPHLPDESFREMLESWSDPLLDKWPDLQREVRLLIAVRNAFSHNQYPMYDETIFSSIRKYDPSSLDAIEERMGLNIAHRLSEEVKLAKEMVERIIQA

SEQ ID NO: 110 - protein, 1125 aa, Prevotella pallens; identical to SEQ ID NO: 92

SEQ ID NO: 111 - protein, 1157 aa, Myoides odoratimum; identical to SEQ ID NO: 93

SEQ ID NO: 112 - protein, 1157 aa, Myroides odoratimum; identical to SEQ ID NO: 94

SEQ ID NO: 113 - protein, 1127 aa, Prevotella sp.
MQKQDKLFVDRKKNAIFAFPKYITIMENQEKPEPIYYELTDKHFWAAFLNLARHNVYTTINHINRRLEIAELKDDGYMMGIKGSWNEQAKKLDKKVRLRDLIMKHFPFLEAAAYEITNSKSPNNKEQREKEQSEALSLNNLKNVLFIFLEKLQVLRNYYSHYKYSEESPKPIFETSLLKNMYKVFDANVRLVKRDYMHHENIDMQRDFTHLNRKKQVGRTKNIIDSPNFHYHFADKEGNMTIAGLLFFVSLFLDKKDAIWMQKKLKGFKDGRNLREQMTNEVFCRSRISLPKLKLENVQTKDWMQLDMLNELVRCPKSLYERLREKDRESFKVPFDIFSDDYDAEEEPFKNTLVRHQDRFPYFVLRYFDLNEIFEQLRFQIDLGTYHFSIYNKRIGDEDEVRHLTHHLYGFARIQDFAPQNQPEEWRKLVKDLDHFETSQEPYISKTAPHYHLENEKIGIKFCSTHNNLFPSLKREKTCNGRSKFNLGTQFTAEAFLSVHELLPMMFYYLLLTKDYSRKESADKVEGIIRKEISNIYAIYDAFANNEINSIADLTCRLQKTNILQGHLPKQMISILEGRQKDMEKEAERKIGEMIDDTQRRLDLLCKQTNQKIRIGKRNAGLLKSGKIADWLVSDMMRFQPVQKDTNNAPINNSKANSTEYRMLQHALALFGSESSRLKAYFRQMNLVGNANPHPFLAETQWEHQTNILSFYRNYLEARKKYLKGLKPQNWKQYQHFLILKVQKTNRNTLVTGWKNSFNLPRGIFTQPIREWFEKHNNSKRIYDQILSFDRVGFVAKAIPLYFAEEYKDNVQPFYDYPFNIGNKLKPQKGQFLDKKERVELWQKNKELFKNYPSEKNKTDLAYLDFLSWKKFERELRLIKNQDIVTWLMFKELFKTTTVEGLKIGEIHLRDIDTNTANEESNNILNRIMPMKLPVKTYETDNKGNILKERPLATFYIEETETKVLKQGNFKVLAKDRRLNGLLSFAETTDIDLEKNPITKLSVDYELIKYQTTRISIFEMTLGLEKKLIDKYSTLPTDSFRNMLERWLQCKANRPELKNYVNSLIAVRNAFSHNQYPMYDATLFAEVKKFTLFPSVDTKKIELNIAPQLLEIVGKAIKEIEKSENKN

SEQ ID NO: 114 - protein, 1119 aa, Porphyromonas gingivalis
MTEQNERPYNGTYYTLEDKHFWAAFFNLARHNAYITLAHIDRQLAYSKADITNDEDILFFKGQWKNLDNDLERKARLRSLILKHFSFLEGAAYGKKLFESQSSGNKSSKKKELTKKEKEELQANALSLDNLKSILFDFLQKLKDFRNYYSHYRHPESSELPLFDGNMLQRLYNVFDVSVQRVKRDHEHNDKVDPHRHFNHLVRKGKKDRYGNNDNPFFKHHFVDREEKVTEAGLLFFVSLFLEKRDAIWMQKKIRGFKGGTETYQQMTNEVFCRSRISLPKLKLESLRTDDWMLLDMLNELVRCPKSLYDRLREEDRARFRVPVDILSDEDDTDGTEEDPFKNTLVRHQDRFPYFALRYFDLKKVFTSLRFHIDLGTYHFAIYKKNIGEQPEDRHLTRNLYGFGRIQDFAEEHRPEEWKRLVRDLDYFETGDKPYITQTTPHYHIEKGKIGLRFVPEGQHLWPSPEVGATRTGRSKYAQDKRLTAEAFLSVHELMPMMFYYFLLREKYSDEASAERVQGRIKRVIEDVYAVYDAFARGEINTRDELDACLADKGIRRGHLPRQMIGILSQEHKDMEEKVRKKLQEMIVDTDHRLDMLDRQTDRKIRIGRKNAGLPKSGVIADWLVRDMMRFQPVAKDTSGKPLNNSKANSTEYRMLQRALALFGGEKERLTPYFRQMNLTGGNNPHPFLHETRWESHTNILSFYRSYLKARKAFLQSIGRSDRVENHRFLLLKEPKTDRQTLVAGWKGEFHLPRGIFTEAVRDCLIEMGLDEVGSYKEVGFMAKAVPLYFERACKDRVQPFYDYPFNVGNSLKPKKGRFLSKEKRAEEWESGKERFRLAKLKKEILEAKEHPYLDFKSWQKFERELRLVKNQDIITWMICRDLMEENKVEGLDTGTLYLKDIRTDVQEQGNLNVLNRVKPMRLPVVVYRADSRGHVHKEQAPLATVYIEERDTKLLKQGNFKSFVKDRRLNGLFSFVDTGALAMEQYPISKLRVEYELAKYQTARVCAFEQTLELEESLLTRYPHLPDKNFRKMLESWSDPLLDKWPDLHGNVRLLIAVRNAFSHNQYPMYDEAVFSSIRKYDPSSPDAIEERMGLNIAHRLSEEVKQAKEMAERIIQA

SEQ ID NO: 115 - protein, 1154 aa, Paludibacter propionicigenes
MKTSANNIYFNGINSFKKIFDSKGAIAPIAEKSCRNFDIKAQNDVNKEQRIHYFAVGHTFKQLDTENLFEYVLDENLRAKRPTRFISLQQFDKEFIENIKRLISDIRNINSHYIHRFDPLKIDAVPTNIIDFLKESFELAVIQIYLKEKGINYLQFSENPHADQKLVAFLHDKFLPLDEKKTSMLQNETPQLKEYKEYRKYFKTLSKQAAIDQLLFAEKETDYIWNLFDSHPVLTISAGKYLSFYSCLFLLSMFLYKSEANQLISKIKGFKKNTTEEEKSKREIFTFFSKRFNSMDIDSEENQLVKFRDLILYLNHYPVAWNKDLELDSSNPAMTDKLKSKIIELEINRSFPLYEGNERFATFAKYQIWGKKHLGKSIEKEYINASFTDEEITAYTYETDTCPELKDAHKKLADLKAAKGLFGKRKEKNESDIKKTETSIRELQHEPNPIKDKLIQRIEKNLLTVSYGRNQDRFMDFSARFLAEINYFGQDASFKMYHFYATDEQNSELEKYELPKDKKKYDSLKFHQGKLVHFISYKEHLKRYESWDDAFVIENNAIQLKLSFDGVENTVTIQRALLIYLLEDALRNIQNNTAENAGKQLLQEYYSHNKADLSAFKQILTQQDSIEPQQKTEFKKLLPRRLLNNYSPAINHLQTPHSSLPLILEKALLAEKRYCSLVVKAKAEGNYDDFIKRNKGKQFKLQFIRKAWNLMYFRNSYLQNVQAAGHHKSFHIERDEFNDFSRYMFAFEELSQYKYYLNEMFEKKGFFENNEFKILFQSGTSLENLYEKTKQKFEIWLASNTAKTNKPDNYHLNNYEQQFSNQLFFINLSHFINYLKSTGKLQTDANGQIIYEALNNVQYLIPEYYYTDKPERSESKSGNKLYNKLKATKLEDALLYEMAMCYLKADKQIADKAKHPITKLLTSDVEFNITNKEGIQLYHLLVPFKKIDAFIGLKMHKEQQDKKHPTSFLANIVNYLELVKNDKDIRKTYEAFSTNPVKRTLTYDDLAKIDGHLISKSIKFTNVTLELERYFIFKESLIVKKGNNIDFKYIKGLRNYYNNEKKKNEGIRNKAFHFGIPDSKSYDQLIRDAEVMFIANEVKPTHATKYTDLNKQLHTVCDKLMETVHNDYFSKEGDGKKKREAAGQKYFENIISAK

SEQ ID NO: 116 - protein, 1119 aa, Porphyromonas gingivalis
MTEQNEKPYNGTYYTLEDKHFWAAFFNLARHNAYITLAHIDRQLAYSKADITNDEDILFFKGQWKNLDNDLERKARLRSLILKHFSFLEGAAYGKKLFESQSSGNKSSKNKELTKKEKEELQANALSLDNLKSILFDFLQKLKDFRNYYSHYRHPESSELPLFDGNMLQRLYNVFDVSVQRVKRDHEHNDKVDPHRHFNHLVRKGKKDRYGNNDNPFFKHHFVDREGTVTEAGLLFFVSLFLEKRDAIWMQKKIRGFKGGTETYQQMTNEVFCRSRISLPKLKLESLRTDDWMLLDMLNELVRCPKSLYDRLREEDRARFRVPVDILSDEEDTDGAEEDPFKNTLVRHQDRFPYFALRYFDLKKVFTSLRFQIDLGTYHFAIYKKNIGEQPEDRHLTRNLYGFGRIQDFAEEHRPEEWKRLVRDLDYFETGDKPYITQTTPHYHIEKGKIGLRFVPEGQHLWPSPEVGATRTGRSKYAQDKRFTAEAFLSAHELMPMMFYYFLLREKYSEEASAERVQGRIKRVIEDVYAVYDAFARDEINTRDELDACLADKGIRRGHLPRQMIGILSQEHKDMEEKIRKKLQEMMADTDHRLDMLDRQTDRKIRIGRKNAGLPKSGVIADWLVRDMMRFQPVAKDTSGKPLNNSKANSTEYRMLQRALALFGGEKERLTPYFRQMNLTGGNNPHPFLHETRWESHTNILSFYRSYLKARKAFLQSIGRSDRVENHRFLLLKEPKTDRQTLVAGWKGEFHLPRGIFTEAVRDCLIEMGLDEVGSYKEVGFMAKAVPLYFERACKDWVQPFYNYPFNVGNSLKPKKGRFLSKEKRAEEWESGKERFRLAKLKKEILEAKEHPYLDFKSWQKFERELRLVKNQDIITWMICGDLMEENKVEGLDTGTLYLKDIRTDVQEQGSLNVLNRVKPMRLPVVVYRADSRGHVHKEQAPLATVYIEERDTKLLKQGNFKSFVKDRRLNGLFSFVDTGALAMEQYPISKLRVEYELAKYQTARVCAFEQTLELEESLLTRCPHLPDKNFRKMLESWSDPLLDKWPDLHRKVRLLIAVRNAFSHNQYPMYDEAVFSSIRKYDPSFPDAIEERMGLNIAHRLSEEVKQAKETVERIIQA

SEQ ID NO: 117 - protein, 1179 aa, Flavobacterium columnare
MSSKNESYNKQKTFNHYKQEDKYFFGGFLNNADDNLRQVGKEFKTRINFNHNNNELASVFKDYFNKEKSVAKREHALNLLSNYFPVLERIQKHTNHNFEQTREIFELLLDTIKKLRDYYTHHYHKPITINPKIYDFLDDTLLDVLITIKKKKVKNDTSRELLKEKLRPELTQLKNQKREELIKKGKKLLEENLENAVFNHCLRPFLEENKTDDKQNKTVSLRKYRKSKPNEETSITLTQSGLVFLMSFFLHRKEFQVFTSGLEGFKAKVNTIKEEEISLNKNNIVYMITHWSYSYYNFKGLKHRIKTDQGVSTLEQNNTTHSLTNTNTKEALLTQIVDYLSKVPNEIYETLSEKQQKEFEEDINEYMRENPENEDSTFSSIVSHKVIRKRYENKFNYFAMRFLDEYAELPTLRFMVNFGDYIKDRQKKILESIQFDSERIIKKEIHLFEKLSLVTEYKKNVYLKETSNIDLSRFPLFPNPSYVMANNNIPFYIDSRSNNLDEYLNQKKKAQSQNKKRNLTFEKYNKEQSKDAIIAMLQKEIGVKDLQQRSTIGLLSCNELPSMLYEVIVKDIKGAELENKIAQKIREQYQSIRDFTLDSPQKDNIPTTLIKTINTDSSVTFENQPIDIPRLKNAIQKELTLTQEKLLNVKEHEIEVDNYNRNKNTYKFKNQPKNKVDDKKLQRKYVFYRNEIRQEANWLASDLIHFMKNKSLWKGYMHNELQSFLAFFEDKKNDCIALLETVFNLKEDCILTKGLKNLFLKHGNFIDFYKEYLKLKEDFLNTESTFLENGLIGLPPKILKKELSKRFKYIFIVFQKRQFIIKELEEKKNNLYADAINLSRGIFDEKPTMIPFKKPNPDEFASWFVASYQYNNYQSFYELTPDIVERDKKKKYKNLRAINKVKIQDYYLKLMVDTLYQDLFNQPLDKSLSDFYVSKAEREKIKADAKAYQKRNDSSLWNKVIHLSLQNNRITANPKLKDIGKYKRALQDEKIATLLTYDDRTWTYALQKPEKENENDYKELHYTALNMELQEYEKVRSKELLKQVQELEKQILEEYTDFLSTQIHPADFEREGNPNFKKYLAHSILENEDDLDKLPEKVEAMRELDETITNPIIKKAIVLIIIRNKMAHNQYPPKFIYDLANRFVPKKEEEYFATYFNRVFETITKELWENKEKKDKTQV

SEQ ID NO: 118 - protein, 1145 aa, Psychroflexus torquis
MESIIGLGLSFNPYKTADKHYFGSFLNLVENNLNAVFAEFKERISYKAKDENISSLIEKHFIDNMSIVDYEKKISILNGYLPIIDFLDDELENNLNTRVKNFKKNFIILAEAIEKLRDYYTHFYHDPITFEDNKEPLLELLDEVLLKTILDVKKKYLKTDKTKEILKDSLREEMDLLVIRKTDELREKKKTNPKIQHTDSSQIKNSIFNDAFQGLLYEDKGNNKKTQVSHRAKTRLNPKDIHKQEERDFEIPLSTSGLVFLMSLFLSKKEIEDFKSNIKGFKGKVVKDENHNSLKYMATHRVYSILAFKGLKYRIKTDTFSKETLMMQMIDELSKVPDCVYQNLSETKQKDFIEDWNEYFKDNEENTENLENSRVVHPVIRKRYEDKFNYFAIRFLDEFANFKTLKFQVFMGYYIHDQRTKTIGTTNITTERTVKEKINVFGKLSKMDNLKKHFFSQLSDDENTDWEFFPNPSYNFLTQADNSPANNIPIYLELKNQQIIKEKDAIKAEVNQTQNRNPNKPSKRDLLNKILKTYEDFHQGDPTAILSLNEIPALLHLFLVKPNNKTGQQIENIIRIKIEKQFKAINHPSKNNKGIPKSLFADTNVRVNAIKLKKDLEAELDMLNKKHIAFKENQKASSNYDKLLKEHQFTPKNKRPELRKYVFYKSEKGEEATWLANDIKRFMPKDFKTKWKGCQHSELQRKLAFYDRHTKQDIKELLSGCEFDHSLLDINAYFQKDNFEDFFSKYLENRIETLEGVLKKLHDFKNEPTPLKGVFKNCFKFLKRQNYVTESPEIIKKRILAKPTFLPRGVFDERPTMKKGKNPLKDKNEFAEWFVEYLENKDYQKFYNAEEYRMRDADFKKNAVIKKQKLKDFYTLQMVNYLLKEVFGKDEMNLQLSELFQTRQERLKLQGIAKKQMNKETGDSSENTRNQTYIWNKDVPVSFFNGKVTIDKVKLKNIGKYKRYERDERVKTFIGYEVDEKWMMYLPHNWKDRYSVKPINVIDLQIQEYEEIRSHELLKEIQNLEQYIYDHTTDKNILLQDGNPNFKMYVLNGLLIGIKQVNIPDFIVLKQNTNFDKIDFTGIASCSELEKKTIILIAIRNKFAHNQLPNKMIYDLANEFLKIEKNETYANYYLKVLKKMISDLA

SEQ ID NO: 119 - protein, 948 aa, Riemerella anatipestifer
MFFSFHNAQRVIFKHLYKAFDASLRMVKEDYKAHFTVNLTRDFAHLNRKGKNKQDNPDFNRYRFEKDGFFTESGLLFFTNLFLDKRDAYWMLKKVSGFKASHKQREKMTTEVFCRSRILLPKLRLESRYDHNQMLLDMLSELSRCPKLLYEKLSEENKKHFQVEADGFLDEIEEEQNPFKDTLIRHQDRFPYFALRYLDLNESFKSIRFQVDLGTYHYCIYDKKIGDEQEKRHLTRTLLSFGRLQDFTEINRPQEWKALTKDLDYKETSNQPFISKTTPHYHITDNKIGFRLGTSKELYPSLEIKDGANRIAKYPYNSGFVAHAFISVHELLPLMFYQHLTGKSEDLLKETVRHIQRIYKDFEEERINTIEDLEKANQGRLPLGAFPKQMLGLLQNKQPDLSEKAKIKIEKLIAETKLLSHRLNTKLKSSPKLGKRREKLIKTGVLADWLVKDFMRFQPVAYDAQNQPIKSSKANSTEFWFIRRALALYGGEKNRLEGYFKQTNLIGNTNPHPFLNKFNWKACRNLVDFYQQYLEQREKFLEAIKHQPWEPYQYCLLLKVPKENRKNLVKGWEQGGISLPRGLFTEAIRETLSKDLTLSKPIRKEIKKHGRVGFISRAITLYFKEKYQDKHQSFYNLSYKLEAKAPLLKKEEHYEYWQQNKPQSPTESQRLELHTSDRWKDYLLYKRWQHLEKKLRLYRNQDIMLWLMTLELTKNHFKELNLNYHQLKLENLAVNVQEADAKLNPLNQTLPMVLPVKVYPTTAFGEVQYHETPIRTVYIREEQTKALKMGNFKALVKDRRLNGLFSFIKEENDTQKHPISQLRLRRELEIYQSLRVDAFKETLSLEEKLLNKHASLSSLENEFRTLLEEWKKKYAASSMVTDKHIAFIASVRNAFCHNQYPFYKETLHAPILLFTVAQPTTEEKDGLGIAEALLKVLREYCEIVKSQI

SEQ ID NO: 120 - protein, 1139 aa, Prevotella pleuritidis
MENDKRLEESACYTLNDKHFWAAFLNLARHNVYITVNHINKTLELKNKKNQEIIIDNDQDILAIKTHWAKVNGDLNKTDRLRELMIKHFPFLEAAIYSNNKEDKEEVKEEKQAKAQSFKSLKDCLFLFLEKLQEARNYYSHYKYSESSKEPEFEEGLLEKMYNTFDASIRLVKEDYQYNKDIDPEKDFKHLERKEDFNYLFTDKDNKGKITKNGLLFFVSLFLEKKDAIWMQQKFRGFKDNRGNKEKMTHEVFCRSRMLLPKIRLESTQTQDWILLDMLNELIRCPKSLYERLQGAYREKFKVPFDSIDEDYDAEQEPFRNTLVRHQDRFPYFALRYFDYNEIFKNLRFQIDLGTYHFSIYKKLIGGKKEDRHLTHKLYGFERIQEFTKQNRPDKWQAIIKDLDTYETSNERYISETTPHYHLENQKIGIRFRNDNNDIWPSLKTNGEKNEKSKYNLDKPYQAEAFLSVHELLPMMFYYLLLKMENTDNDKEDNEVGTKKKGNKNNKQEKHKIEEIIENKIKDIYALYDAFTNGEINSIDELAEQREGKDIEIGHLPKQLIVILKNKSKDMAEKANRKQKEMIKDTKKRLATLDKQVKGEIEDGGRNIRLLKSGEIARWLVNDMMRFQPVQKDNEGKPLNNSKANSTEYQMLQRSLALYNKEEKPTRYFRQVNLIKSSNPHPFLEDTKWEECYNILSFYRNYLKAKIKFLNKLKPEDWKKNQYFLMLKEPKTNRKTLVQGWKNGFNLPRGIFTEPIKEWFKRHQNDSEEYKKVEALDRVGLVAKVIPLFFKEEYFKEDAQKEINNCVQPFYSFPYNVGNIHKPEEKNFLHCEERRKLWDKKKDKFKGYKAKEKSKKMTDKEKEEHRSYLEFQSWNKFERELRLVRNQDILTWLLCTKLIDKLKIDELNIEELQKLRLKDIDTDTAKKEKNNILNRVMPMRLPVTVYEIDKSFNIVKDKPLHTVYIEETGTKLLKQGNFKALVKDRRLNGLFSFVKTSSEAESKSKPISKLRVEYELGAYQKARIDIIKDMLALEKTLIDNDENLPTNKFSDMLKSWLKGKGEANKARLQNDVGLLVAVRNAFSHNQYPMYNSEVFKGMKLLSLSSDIPEKEGLGIAKQLKDKIKETIERIIEIEKEIRN

SEQ ID NO: 121 - protein, 1135 aa, Porphyromonas gingivalis; identical to SEQ ID NO: 99

SEQ ID NO: 122 - protein, 1135 aa, Porphyromonas gingivalis
MNTVPASENKGQSRTVEDDPQYFGLYLNLARENLIEVESHVRIKFGKKKLNEESLKQSLLCDHLLSVDRWTKVYGHSRRYLPFLHYFDPDSQIEKDHDSKTGVDPDSAQRLIRELYSLLDFLRNDFSHNRLDGTTFEHLEVSPDISSFITGTYSLACGRAQSRFADFFKPDDFVLAKNRKEQLISVADGKECLTVSGLAFFICLFLDREQASGMLSRIRGFKRTNENWARAVHETFCDLCIRHPHDRLESSNTKEALLLDMLNELNRCPRILYDMLPEEERAQFLPALDENSMNNLSENSLNEESRLLWDGSSDWAEALTKRIRHQDRFPYLMLRFIEEMDLLKGIRFRVDLGEIELDSYSKKVGRNGEYDRTITDHALAFGKLSDFQNEEEVSRMISGEASYPVRFSLFAPRYAIYDNKIGYCHTSDPVYPKSKTGEKRALSNPQSMGFISVHDLRKLLLMELLCEGSFSRMQSGFLRKANRILDETAEGKLQFSALFPEMRHRFIPPQNPKSKDRREKAETTLEKYKQEIKGRKDKLNSQLLSAFDMNQRQLPSRLLDEWMNIRPASHSVKLRTYVKQLNEDCRLRLRKFRKDGDGKARAIPLVGEMATFLSQDIVRMIISEETKKLITSAYYNEMQRSLAQYAGEENRRQFRAIVAELHLLDPSSGHPFLSATMETAHRYTEDFYKCYLEKKREWLAKTFYRPEQDENTKRRISVFFVPDGEARKLLPLLIRRRMKEQNDLQDWIRNKQAHPIDLPSHLFDSKIMELLKVKDGKKKWNEAFKDWWSTKYPDGMQPFYGLRRELNIHGKSVSYIPSDGKKFADCYTHLMEKTVQDKKRELRTAGKPVPPDLAADIKRSFHRAVNEREFMLRLVQEDDRLMLMAINKMMTDREEDILPGLKNIDSILDKENQFSLAVHAKVLEKEGEGGDNSLSLVPATIEIKSKRKDWSKYIRYRYDRRVPGLMSHFPEHKATLDEVKTLLGEYDRCRIKIFDWAFALEGAIMSDRDLKPYLHESSSREGKSGEHSTLVKMLVEKKGCLTPDESQYLILIRNKAAHNQFPCAAEMPLIYRDVSAKVGSIEGSSAKDLPEGSSLVDSLWKKYEMIIRKILPILDHENRFFGKLLNNMSQPINDL

SEQ ID NO: 123 - protein, 1135 aa, Porphyromonas gingivalis; identical to SEQ ID NO: 100

SEQ ID NO: 124 - protein, 1135 aa, Porphyromonas gingivalis; identical to SEQ ID NO: 101

SEQ ID NO: 125 - protein, 1135 aa, Porphyromonas gingivalis
MNTVPASENKGQSRTVEDDPQYFGLYLNLARENLIEVESHVRIKFGKKKLNEESLKQSLLCDHLLSVDRWTKVYGHSRRYLPFLHYFDPDSQIEKDHDSKTGVDPDSAQRLIRELYSLLDFLRNDFSHNRLDGTTFEHLEVSPDISSFITGTYSLACGRAQSRFADFFKPDDFVLAKNRKEQLISVADGKECLTVSGLAFFICLFLDREQASGMLSRIRGFKRTDENWARAVHETFCDLCIRHPHDRLESSNTKEALLLDMLNELNRCPRILYDMLPEEERAQFLPALDENSMNNLSENSLNEESRLLWDGSSDWAEALTKRIRHQDRFPYLMLRFIEEMDLLKGIRFRVDLGEIELDSYSKKVGRNGEYDRTITDHALAFGKLSDFQNEEEVSRMISGEASYPVRFSLFAPRYAIYDNKIGYCHTSDPVYPKSKTGEKRALSNPRSMGFISVHDLRKLLLMELLCEGSFSRMQSDFLRKANRILDETAEGKLQFSALFPEMRHRFIPPQNPKSKDRREKAETTLEKYKQEIKGRKDKLNSQLLSAFDMNQRQLPSRLLDEWMNIRPASHSVKLRTYVKQLNEDCRLRLRKFRKDGDGKARAIPLVGEMATFLSQDIVRMIISEETKKLITSAYYNEMQRSLAQYAGEENRRQFRAIVAELHLLDPSSGHPFLSATMETAHRYTEDFYKCYLEKKREWLAKTFYRPEQDENTKRRISVFFVPDGEARKLLPLLIRRRMKEQNDLQDWIRNKQAHPIDLPSHLFDSKIMELLKVKDGKKKWNEAFKDWWSTKYPDGMQPFYGLRRELNIHGKSVSYIPSDGKKFADCYTHLMEKTVQDKKRELRTAGKPVPPDLAADIKRSFHRAVNEREFMLRLVQEDDRLMLMAINKMMTDREEDILPGLKNIDSILDEENQFSLAVHAKVLEKEGEGGDNSLSLVPATIEIKSKRKDWSKYIRYRYDRRVPGLMSHFPEHKATLDEVKTLLGEYDRCRIKIFDWAFALEGAIMSDRDLKPYLHESSSREGKSGEHSTLVKMLVEKKGCLTPDESQYLILIRNKAAHNQFPCAAEMPLIYRDVSAKVGSIEGSSAKDLPEGSSLVDSLWKKYEMIIRKILPILDPENRFFGKLLNNMSQPINDL

SEQ ID NO: 126 - protein, 1133 aa, Prevotella falsenii
MKNDNNSTKSTDYTLGDKHFWAAFLNLARHNVYITVNHINKVLELKNKKDQEIIIDNDQDILAIKTLWGKVDTDINKKDRLRELIMKHFPFLEAATYQQSSTNNTKQKEEEQAKAQSFESLKDCLFLFLEKLREARNYYSHYKHSKSLEEPKLEEKLLENMYNIFDTNVQLVIKDYEHNKDINPEEDFKHLGRAEGEFNYYFTRNKKGNITESGLLFFVSLFLEKKDAIWAQTKIKGFKDNRENKQKMTHEVFCRSRMLLPKLRLESTQTQDWILLDMLNELIRCPKSLYKRLQGEKREKFRVPFDPADEDYDAEQEPFKNTLVRHQDRFPYFALRYFDYNEIFTNLRFQIDLGTYHFSIYKKQIGDKKEDRHLTHKLYGFERIQEFAKENRPDEWKALVKDLDTFEESNEPYISETTPHYHLENQKIGIRNKNKKKKKTIWPSLETKTTVNERSKYNLGKSFKAEAFLSVHELLPMMFYYLLLNKEEPNNGKINASKVEGIIEKKIRDIYKLYGAFANEEINNEEELKEYCEGKDIAIRHLPKQMIAILKNEYKDMAKKAEDKQKKMIKDTKKRLAALDKQVKGEVEDGGRNIKPLKSGRIASWLVNDMMRFQPVQRDRDGYPLNNSKANSTEYQLLQRTLALFGSERERLAPYFRQMNLIGKDNPHPFLKDTKWKEHNNILSFYRSYLEAKKNFLGSLKPEDWKKNQYFLKLKEPKTNRETLVQGWKNGFNLPRGIFTEPIREWFIRHQNESEEYKKVKDFDRIGLVAKVIPLFFKEDYQKEIEDYVQPFYGYPFNVGNIHNSQEGTFLNKKEREELWKGNKTKFKDYKTKEKNKEKTNKDKFKKKTDEEKEEFRSYLDFQSWKKFERELRLVRNQDIVTWLLCMELIDKLKIDELNIEELQKLRLKDIDTDTAKKEKNNILNRIMPMELPVTVYETDDSNNIIKDKPLHTIYIKEAETKLLKQGNFKALVKDRRLNGLFSFVETSSEAELKSKPISKSLVEYELGEYQRARVEIIKDMLRLEETLIGNDEKLPTNKFRQMLDKWLEHKKETDDTDLKNDVKLLTEVRNAFSHNQYPMRDRIAFANIKPFSLSSANTSNEEGLGIAKKLKDKTKETIDRIIEIEEQTATKR

SEQ ID NO: 127 - protein, 1116 aa, Prevotella pleuritidis
MENDKRLEESTCYTLNDKHFWAAFLNLARHNVYITINHINKLLEIRQIDNDEKVLDIKALWQKVDKDINQKARLRELMIKHFPFLEAAIYSNNKEDKEEVKEEKQAKAQSFKSLKDCLFLFLEKLQEARNYYSHYKSSESSKEPEFEEGLLEKMYNTFGVSIRLVKEDYQYNKDIDPEKDFKHLERKEDFNYLFTDKDNKGKITKNGLLFFVSLFLEKKDAIWMQQKLRGFKDNRGNKEKMTHEVFCRSRMLLPKIRLESTQTQDWILLDMLNELIRCPKSLYERLQGAYREKFKVPFDSIDEDYDAEQEPFRNTLVRHQDRFPYFALRYFDYNEIFKNLRFQIDLGTYHFSIYKKLIGDNKEDRHLTHKLYGFERIQEFAKQKRPNEWQALVKDLDIYETSNEQYISETTPHYHLENQKIGIRFKNKKDKIWPSLETNGKENEKSKYNLDKSFQAEAFLSIHELLPMMFYDLLLKKEEPNNDEKNASIVEGFIKKEIKRMYAIYDAFANEEINSKEGLEEYCKNKGFQERHLPKQMIAILTNKSKNMAEKAKRKQKEMIKDTKKRLATLDKQVKGEIEDGGRNIRLLKSGEIARWLVNDMMRFQSVQKDKEGKPLNNSKANSTEYQMLQRSLALYNKEQKPTPYFIQVNLIKSSNPHPFLEETKWEECNNILSFYRSYLEAKKNFLESLKPEDWKKNQYFLMLKEPKTNRKTLVQGWKNGFNLPRGIFTEPIKEWFKRHQNDSEEYKKVEALDRVGLVAKVIPLFFKEEYFKEDAQKEINNCVQPFYSFPYNVGNIHKPEEKNFLHCEERRKLWDKKKDKFKGYKAKEKSKKMTDKEKEEHRSYLEFQSWNKFERELRLVRNQDIVTWLLCTELIDKLKIDELNIEELQKLRLKDIDTDTAKKEKNNILNRIMPMQLPVTVYEIDKSFNIVKDKPLHTIYIEETGTKLLKQGNFKALVKDRRLNGLFSFVKTSSEAESKSKPISKLRVEYELGAYQKARIDIIKDMLALEKTLIDNDENLPTNKFSDMLKSWLKGKGEANKARLQNDVDLLVAIRNAFSHNQYPMYNSEVFKGMKLLSLSSDIPEKEGLGIAKQLKDKIKETIERIIEIEKEIRN

SEQ ID NO: 128 - protein, 1119 aa, Porphyromonas gingivalis
MTEQNERPYNGTYYTLEDKHFWAAFFNLARHNAYITLAHIDRQLAYSKADITNDEDILFFKGQWKNLDNDLERKARLRSLILKHFSFLEGAAYGKKLFESQSSGNKSSKKKELTKKEKEELQANALSLDNLKSILFDFLQKLKDFRNYYSHYRHPESSELPLFDGNMLQRLYNVFDVSVQRVKRDHEHNDKVDPHRHFNHLVRKGKKDRYGNNDNPFFKHHFVDREGTVTEAGLLFFVSLFLEKRDAIWMQKKIRGFKGGTEAYQQMTNEVFCRSRISLPKLKLESLRTDDWMLLDMLNELVRCPKSLYDRLREEDRARFRVPIDILSDEDDTDGTEEDPFKNTLVRHQDRFPYFALRYFDLKKVFTSLRFHIDLGTYHFAIYKKNIGEQPEDRHLTRNLYGFGRIQDFAEEHRPEEWKRLVRDLDYFETGDKPYITQTTPHYHIEKGKIGLRFVPEGQHLWPSPEVGATRTGRSKYAQDKRLTAEAFLSVHELMPMMFYYFLLREKYSEEVSAEKVQGRIKRVIEDVYAVYDAFARGEIDTLDRLDACLADKGIRRGHLPRQMIAILSQEHKDMEEKVRKKLQEMIADTDHRLDMLDRQTDRKIRIGRKNAGLPKSGVIADWLVRDMMRFQPVAKDTSGKPLNNSKANSTEYRMLQRALALFGGEKERLTPYFRQMNLTGGNNPHPFLHETRWESHTNILSFYRSYLKARKAFLQSIGRSDREENHRFLLLKEPKTDRQTLVAGWKSEFHLPRGIFTEAVRDCLIEMGYDEVGSYKEVGFMAKAVPLYFERACKDRVQPFYDYPFNVGNSLKPKKGRFLSKEKRAEEWESGKERFRLAKLKKEILEAKEHPYLDFKSWQKFERELRLVKNQDIITWMMCRDLMEENKVEGLDTGTLYLKDIRTDVHEQGSLNVLNRVKPMRLPVVVYRADSRGHVHKEQAPLATVYIEERDTKLLKQGNFKSFVKDRRLNGLFSFVDTGALAMEQYPISKLRVEYELAKYQTARVCAFEQTLELEESLLTRYPHLPDKNFRKMLESWSDPLLDKWPDLHRKVRLLIAVRNAFSHNQYPMYDEAVFSSIRKYDPSSPDAIEERMGLNIAHRLSEEVKQAKEMAERIIQV

SEQ ID NO: 129 - protein, 1175 aa, Porphyromonas gulae
MTEQSERPYNGTYYTLEDKHFWAAFLNLARHNAYITLTHIDRQLAYSKADITNDQDVLSFKALWKNLDNDLERKSRLRSLILKHFSFLEGAAYGKKLFESKSSGNKSSKNKELTKKEKEELQANALSLDNLKSILFDFLQKLKDFRNYYSHYRHSGSSELPLFDGNMLQRLYNVFDVSVQRVKRDHEHNDKVDPHRHFNHLVRKGKKDRYGHNDNPSFKHHFVDSEGMVTEAGLLFFVSLFLEKRDAIWMQKKIRGFKGGTETYQQMTNEVFCRSRISLPKLKLESLRMDDWMLLDMLNELVRCPKPLYDRLREDDRACFRVPVDILPDEDDTDGGGEDPFKNTLVRHQDRFPYFALRYFDLKKVFTSLRFHIDLGTYHFAIYKKMIGEQPEDRHLTRNLYGFGRIQDFAEEHRPEEWKRLVRDLDYFETGDKPYISQTSPHYHIEKGKIGLRFMPEGQHLWPSPEVGTTRTGRSKYAQDKRLTAEAFLSVHELMPMMFYYFLLREKYSEEVSAEKVQGRIKRVIEDVYAIYDAFARDEINTLKELDACLADKGIRRGHLPKQMIAILSQEHKNMEEKVRKKLQEMIADTDHRLDMLDRQTDRKIRIGRKNAGLPKSGVIADWLVRDMMRFQPVAKDASGKPLNNSKANSTEYRMLQRALALFGGEKERLTPYFRQMNLTGGNNPHPFLHDTRWESHTNILSFYRSYLRARKAFLERIGRSDRMENRPFLLLKEPKTDRQTLVAGWKSEFHLPRGIFTEAVRDCLIEMGYDEVGSYREVGFMAKAVPLYFERACEDRVQPFYDSPFNVGNSLKPKKGRFLSKEERAEEWERGKERFRDLEAWSHSAARRIEDAFAGIEYASPGNKKKIEQLLRDLSLWEAFESKLKVRADKINLAKLKKEILEAQEHPYHDFKSWQKFERELRLVKNQDIITWMMCRDLMEENKVEGLDTGTLYLKDIRTNVQEQGSLNVLNHVKPMRLPVVVYRADSRGHVHKEEAPLATVYIEERDTKLLKQGNFKSFVKDRRLNGLFSFVDTGGLAMEQYPISKLRVEYELAKYQTARVCAFEQTLELEESLLTRYPHLPDKNFRKMLESWSDPLLAKWPELHGKVRLLIAVRNAFSHNQYPMYDEAVFSSIRKYDPSSPDAIEERMGLNIAHRLSEEVKQAKETVERIIQA

SEQ ID NO: 130 - protein, 1119 aa, Porphyromonas gulae
MTEQSERPYNGTYYTLEDKHFWAAFLNLARHNAYITLTHIDRQLAYSKADITNDQDVLSFKALWKNLDNDLERKSRLRSLILKHFSFLEGAAYGKKLFESKSSGNKSSKNKELTKKEKEELQANALSLDNLKSILFDFLQKLKDFRNYYSHYRHSGSSELPLFDGNMLQRLYNVFDVSVQRVKRDHEHNDKVDPHRHFNHLVRKGKKDRYGHNDNPSFKHHFVDGEGMVTEAGLLFFVSLFLEKRDAIWMQKKIRGFKGGTETYQQMTNEVFCRSRISLPKLKLESLRTDDWMLLDMLNELVRCPKPLYDRLREKDRARFRVPVDILPDEDDTDGGGEDPFKNTLVRHQDRFPYFALRYFDLKKVFTSLRFHIDLGTYHFAIYKKVIGEQPEDRHLTRNLYGFGRIQDFAEEHRPEEWKRLVRDLDYFETGDKPYISQTTPHYHIEKGKIGLRFVPEGQHLWPSPEVGTTRTGRSKYAQDKRLTAEAFLSVHELMPMMFYYFLLREKYSEEVSAEKVQGRIKRVIEDVYAIYDAFARDEINTRDELDACLADKGIRRGHLPKQMIGILSQEHKNMEEKVRKKLQEMIADTDHRLDMLDRQTDRKIRIGRKNAGLPKSGVIADWLVRDMMRFQPVAKDTSGKPLNNSKANSTEYRMLQRALALFGGEKERLTPYFRQMNLTGGNNPHPFLDETRWESHTNILSFYRSYLRARKAFLERIGRSDRVENRPFLLLKEPKTDRQTLVAGWKSEFHLPRGIFTEAVRDCLIEMGYDEVGSYKEVGFMAKAVPLYFERACKDRVQPFYDSPFNVGNSLKPKKGRFLSKEKRAEEWESGKERFRLAKLKKEILEAQEHPYHDFKSWQKFERELRLVKNQDIITWMMCRDLMEENKVEGLDTGTLYLKDIRPNVQEQGSLNVLNRVKPMRLPVVVYRADSRGHVHKEEAPLATVYIEERDTKLLKQGNFKSFVKDRRLNGLFSFVDTGGLAMEQYPISKLRVEYELAKYQTARVCVFELTLRLEESLLSRYPHLPDESFREMLESWSDPLLAKWPELHGKVRLLIAVRNAFSHNQYPMYDEAVFSSIRKYDPSSPDAIEERMGLNIAHRLSEEVKQAKETVERIIQA

SEQ ID NO: 131 - protein, 1119 aa, Porphyromonas gulae
MTEQSERPYNGTYYTLEDKHFWAAFLNLARHNAYITLTHIDRQLAYSKADITNDQDVLSFKALWKNFDNDLERKSRLRSLILKHFSFLEGAAYGKKLFESKSSGNKSSKNKELTKKEKEELQANALSLDNLKSILFDFLQKLKDFRNYYSHYRHSGSSELPLFDGNMLQRLYNVFDVSVQRVKRDHEHNDKVDPHYHFNHLVRKGKKDRYGHNDNPSFKHHFVDSEGMVTEAGLLFFVSLFLEKRDAIWMQKKIRGFKGGTGPYEQMTNEVFCRSRISLPKLKLESLRTDDWMLLDMLNELVRCPKPLYDRLREKDRACFRVPVDILPDEDDTDGGGEDPFKNTLVRHQDRFPYFALRYFDLKKVFTSLRFHIDLGTYHFAIYKKMIGEQPEDRHLTRNLYGFGRIQDFAEEHRPEEWKRLVRDLDYFETGDKPYISQTTPHYHIEKGKIGLRFMPEGQHLWPSPEVGTTRTGRSKYAQDKRLTAEAFLSVHELMPMMFYYFLLREKYSEEVSAEKVQGRIKRVIKDVYAIYDAFARDEINTLKELDACSADKGIRRGHLPKQMIGILSQEHKNMEEKVRKKLQEMIADTDHRLDMLDRQTDRKIRIGRKNAGLPKSGVIADWLVRDMMRFQPVAKDTSGKPLNNSKANSTEYRMLQRALALFGGEKERLTPYFRQMNLTGGNNPHPFLDETRWESHTNILSFYRSYLRARKAFLERIGRSDRVENRPFLLLKEPKNDRQTLVAGWKSEFHLPRGIFTEAVRDCLIEMGYDEVGSYKEVGFMAKAVPLYFERACKDRVQPFYDSPFNVGNSLKPKKGRFLSKEKRAEEWESGKERFRLAKLKKEILEAKEHPYHDFKSWQKFERELRLVKNQDIITWMMCRDLMEENKVEGLDTGTLYLKDIRTDVHEQGSLNVLNRVKPMRLPVVVYRADSRGHVHKEQAPLATVYIEERDTKLLKQGNFKSFVKDRRLNGLFSFVDTGGLAMEQYPISKLRVEYELAKYQTARVCAFEQTLELEESLLTRYPHLPDENFREMLESWSDPLLGKWPDLHGKVRLLIAVRNAFSHNQYPMYDEAVFSSIRKYDPSSPDAIEERMGLNIAHRLSEEVKQAKETVERIIQA

SEQ ID NO: 132 - protein, 1175 aa, Porphyromonas gulae
MTEQSERPYNGTYYTLEDKHFWAAFLNLARHNAYITLTHIDRQLAYSKADITNDQDVLSFKALWKNFDNDLERKSRLRSLILKHFSFLEGAAYGKKLFESKSSGNKSSKNKELTKKEKEELQANALSLDNLKSILFDFLQKLKDFRNYYSHYRHSESSELPLFDGNMLQRLYNVFDVSVQRVKRDHEHNDKVDPHRHFNHLVRKGKKDRYGHNDNPSFKHHFVDGEGMVTEAGLLFFVSLFLEKRDAIWMQKKIRGFKGGTETYQQMTNEVFCRSRISLPKLKLESLRTDDWMLLDMLNELVRCPKPLYDRLREDDRACFRVPVDILPDEDDTDGGGEDPFKNTLVRHQDRFPYFALRYFDLKKVFTSLRFHIDLGTYHFAIYKKMIGEQPEDRHLTRNLYGFGRIQDFAEEHRPEEWKRLVRDLDYFETGDKPYISQTSPHYHIEKGKIGLRFMPEGQHLWPSPEVGTTRTGRSKYAQDKRLTAEAFLSVHELMPMMFYYFLLREKYSEEVSAEKVQGRIKRVIEDVYAIYDAFARDEINTLKELDACLADKGIRRGHLPKQMIAILSQEHKDMEEKIRKKLQEMIADTDHRLDMLDRQTDRKIRIGRKNAGLPKSGVIADWLVRDMMRFQPVAKDTSGKPLNNSKANSTEYRMLQRALALFGGEKKRLTPYFRQMNLTGGNNPHPFLHETRWESHTNILSFYRSYLRARKAFLERIGRSDRMENRPFLLLKEPKTDRQTLVAGWKSEFHLPRGIFTEAVRDCLIEMGYDEVGSYREVGFMAKAVPLYFERACEDRVQPFYDSPFNVGNSLKPKKGRFLSKEERAEEWERGKERFRDLEAWSHSAARRIEDAFAGIEYASPGNKKKIEQLLRDLSLWEAFESKLKVRADKINLAKLKKEILEAQEHPYHDFKSWQKFERELRLVKNQDIITWMMCRDLMEENKVEGLDTGTLYLKDIRPNVQEQGSLNVLNRVKPMRLPVVVYRADSRGHVHKEEAPLATVYIEERDTKLLKQGNFKSFVKDRRLNGLFSFVDTGGLAMEQYPISKLRVEYELAKYQTARVCVFELTLRLEESLLTRYPHLPDESFRKMLESWSDPLLAKWPELHGKVRLLIAVRNAFSHNQYPMYDEAVFSSIRKYDPSSPDAIEERMGLNIAHRLSEEVKQAKETVERIIQV

SEQ ID NO: 133 - protein, 1119 aa, Porphyromonas gulae
MTEQSERPYNGTYYTLEDKHFWAAFLNLARHNAYITLTHIDRQLAYSKADITNDEDILFFKGQWKNLDNDLERKSRLRSLILKHFSFLEGAAYGKKFFESKSSGNKSSKNKELTKKEKEELQANALSLDNLKSILFDFLQKLKDFRNYYSHYRHSGSSELPLFDGNMLQRLYNVFDVSVQRVKRDHEHNDEVDPHYHFNHLVRKGKKDRYGHNDNPSFKHHFVDGEGMVTEAGLLFFVSLFLEKRDAIWMQKKIRGFKGGTEPYEQMTNEVFCRSRISLPKLKLESLRTDDWMLLDMLNELVRCPKPLYDRLREKDRACFRVPVDILPDEDDTDGGGEDPFKNTLVRHQDRFPYFALRYFDLKKVFTSLRFHIDLGTYHFAIYKKMIGEQPEDRHLTRNLYGFGRIQDFAEEHRPEEWKRLVRDLDYFETGDKPYISQTTPHYHIEKGKIGLRFVPEGQHLWPSPEVGTTRTGRSKYAQDKRLTAEAFLSVHELMPMMFYYFLLREKYSEEVSAEKVQGRIKRVIEDVYAIYDAFARDEINTLKELDACLADKGIRRGHLPKQMIGILSQERKDMEEKVRKKLQEMIADTDHRLDMLDRQTDRKIRIGRKNAGLPKSGVIADWLVRDMMRFQPVAKDTSGKPLNNSKANSTEYRMLQRALALFGGEKERLTPYFRQMNLTGGNNPHPFLHETRWESHTNILSFYRSYLRARKAFLERIGRSDRVENCPFLLLKEPKTDRQTLVAGWKGEFHLPRGIFTEAVRDCLIEMGYDEVGSYREVGFMAKAVPLYFERACEDRVQPFYDSPFNVGNSLKPKKGRFLSKEKRAEEWESGKERFRLAKLKKEILEAQEHPYHDFKSWQKFERELRLVKNQDIITWMMCRDLMEENKVEGLDTGTLYLKDIRPNVQEQGSLNVLNRVKPMRLPVVVYRADSRGHVHKEEAPLATVYIEERDTKLLKQGNFKSFVKDRRLNGLFSFVDTGALAMEQYPISKLRVEYELAKYQTARVCAFEQTLELEESLLTRYPHLPDESFREMLESWSDPLLTKWPELHGKVRLLIAVRNAFSHNQYPMYDEAVFSSIWKYDPSSPDAIEERMGLNIAHRLSEEVKQAKETIERIIQA

SEQ ID NO: 134 - protein, 1174 aa, Porphyromonas gulae
MTEQSERPYNGTYYTLEDKHFWAAFLNLARHNAYITLTHIDRQLAYSKADITNDQDVLSFKALWKNLDNDLERKSRLRSLILKHFSFLEGAAYGKKLFESKSSGNKSSKNKELTKKEKEELQANALSLDNLKSILFDFLQKLKDFRNYYSHYRHSGSSELPLFDGNMLQRLYNVFDVSVQRVKRDHEHNDKVDPHYHFNHLVRKGKKDRYGHNDNPSFKHHFVDSEGMVTEAGLLFFVSLFLEKRDAIWMQKKIRGFKGGTGPYEQMTNEVFCRSRISLPKLKLESLRTDDWMLLDMLNELVRCPKPLYDRLREKDRACFRVPVDILPDEDDTDGGGEDPFKNTLVRHQDRFPYFALRYFDLKKVFTSLRFHIDLGTYHFAIYKKMIGEQPEDRHLTRNLYGFGRIQDFAEEHRPEEWKRLVRDLDYLETGDKPYISQTTPHYHIEKGKIGLRFVPEGQHLWPSPEVGTTRTGRSKCAQDKRLTAEAFLSVHELMPMMFYYFLLREKYSEEVSAEKVQGRIKRVIEDVYAIYDAFARDEINTLKELDTCLADKGIRRGHLPKQMITILSQERKDMKEKIRKKLQEMIADTDHRLDMLDRQTDRKIRIGRKNAGLPKSGVIADWLVRDMMRFQPVAKDASGKPLNNSKANSTEYRMLQRALALFGGEKERLTPYFRQMNLTGGNNPHPFLHETRWESHTNILSFYRSYLRARKAFLERIGRSDRVENCPFLLLKEPKTDRQTLVAGWKDEFHLPRGIFTEAVRDCLIEMGYDEVGSYREVGFMAKAVPLYFERACEDRVQPFYDSPFNVGNSLKPKKGRFLSKEDRAEEWERGMERFRDLEAWSHSAARRIKDAFAGIEYASPGNKKKIEQLLRDLSLWEAFESKLKVRADKINLAKLKKEILEAQEHPYHDFKSWQKFERELRLVKNQDIITWMMCRDLMEENKVEGLDTGTLYLKDIRPNVQEQGSLNVLNRVKPMRLPVVVYRADSRGHVHKEAPLATVYIEERNTKLLKQGNFKSFVKDRRLNGLFSFVDTGGLAMEQYPISKLRVEYELAKYQTARVCVFELTLRLEESLLSRYPHLPDESFREMLESWSDPLLAKWPELHGKVRLLIAVRNAFSHNQYPMYDEAVFSSIRKYDPSSPDAIEERMGLNIAHRLSEEVKQAKETVERIIQA

SEQ ID NO: 135 - protein, 1135 aa, Porphyromonas gulae
MNTVPATENKGQSRTVEDDPQYFGLYLNLARENLIEVESHVRIKFGKKKLNEESLKQSLLCDHLLSIDRWTKVYGHSRRYLPFLHCFDPDSGIEKDHDSKTGVDPDSAQRLIRELYSLLDFLRNDFSHNRLDGTTFEHLKVSPDISSFITGAYTFACERAQSRFADFFKPDDFLLAKNRKEQLISVADGKECLTVSGFAFFICLFLDREQASGMLSRIRGFKRTDENWARAVHETFCDLCIRHPHDRLESSNTKEALLLDMLNELNRCPRILYDMLPEEERAQFLPALDENSMNNLSENSLNEESRLLWDGSSDWAEALTKRIRHQDRFPYLMLRFIEEMDLLKGIRFRVDLGEIELDSYSKKVGRNGEYDRTITDHALAFGKLSDFQNEEEVSRMISGEASYPVRFSLFAPRYAIYDNKIGYCHTSDPVYPKSKTGEKRALSNPQSMGFISVHDLRKLLLMELLCEGSFSRMQSDFLRKANRILDETAEGKLQFSALFPEMRHRFIPPQNPKSKDRREKAETTLEKYKQEIKGRKDKLNSQLLSAFDMNQRQLPSRLLDEWMNIRPASHSVKLRTYVKQLNEDCRLRLRKFRKDGDGKARAIPLVGEMATFLSQDIVRMIISEETKKLITSAYYNEMQRSLAQYAGEENRRQFRAIVAELHLLDPSSGHPFLSATMETAHRYTEDFYKCYLEKKREWLAKTFYRPEQDENTKRRISVFFVPDGEARKLLPLLIRRRMKEQNDLQDWIRNKQAHPIDLPSHLFDSKIMELLKVKDGKKKWNEAFKDWWSTKYPDGMQPFYGLRRELNIHGKSVSYIPSDGKKFADCYTHLMEKTVRDKKRELRTAGKPVPPDLAAYIKRSFHRAVNEREFMLRLVQEDDRLMLMAINKMMTDREEDILPGLKNIDSILDEENQFSLAVHAKVLEKEGEGGDNSLSLVPATIEIKSKRKDWSKYIRYRYDRRVPGLMSHFPEHKATLDEVKTLLGEYDRCRIKIFDWAFALEGAIMSDRDLKPYLHESSSREGKSGEHSTLVKMLVEKKGCLTPDESQYLILIRNKAAHNQFPCAAEMPLIYRDVSAKVGSIEGSSAKDLPEGSSLVDSLWKKYEMIIRKILPILDHENRFFGKLLNNMSQPINDL

SEQ ID NO: 136 - protein, 1218 aa, Capnocytophaga cynodegmi
MENKTSLGNNIYYNPFKPQDKSYFAGYLNAAMENIDSVFRELGKRLKGKEYTSENFFDAIFKENISLVEYERYVKLLSDYFPMARLLDKKEVPIKERKENFKKNFRGIIKAVRDLRNFYTHKEHGEVEITDEIFGVLDEMLKSTVLTVKKKKIKTDKTKEILKKSIEKQLDILCQKKLEYLKDTARKIEEKRRNQRERGEKKLVPRFEYSDRRDDLIAAIYNDAFDVYIDKKKDSLKESSKTKYNTESYPQQEEGDLKIPISKNGVVFLLSLFLSKQEVHAFKSKIAGFKATVIDEATVSHRKNSICFMATHEIFSHLAYKKLKRKVRTAEINYSEAENAEQLSIYAKETLMMQMLDELSKVPDVVYQNLSEDVQKTFIEDWNEYLKENNGDVGTMEEEQVIHPVIRKRYEDKFNYFAIRFLDEFAQFPTLRFQVHLGNYLHDSRPKEHLISDRRIKEKITVFGRLSELEHKKALFIKNTETNEDRKHYWEVFPNPNYDFPKENISVNDKDFPIAGSILDREKQPTAGKIGIKVNLLNQKYISEVDKAVKAHQLKQRNNKPSIQNIIEEIVPINGSNPKEIIVFGGQPTAYLSMNDIHSILYEFFDKWEKKKEKLEKKGEKELRKEIGKELEEKIVGKIQTQIQQIIDKDINAKILKPYQDDDSTAIDKEKLIKDLKQEQKILQKLKNEQTAREKEYQECIAYQEESRKIKRSDKSRQKYLRNQLKRKYPEVPTRKEILYYQEKGKVAVWLANDIKRFMPTDFKNEWKGEQHSLLQKSLAYYEQCKEELKNLLPQQKVFKHLPFELGGHFQQKYLYQFYTRYLDKRLEHISGLVQQAENFKNENKVFKKVENECFKFLKKQNYTHKGLDAQAQSVLGYPIFLERGFMDEKPTIIKGKTFKGNESLFTDWFRYYKEYQNFQTFYDTENYPLVELEKKQADRKRETKIYQQKKNDVFTLLMAKHIFKSVFKQDSIDRFSLEDLYQSREERLENQEKAKQTGERNTNYIWNKTVDLNLCDGKVTVENVKLKNVGNFIKYEYDQRVQTFLKYEENIKWQAFLIKESKEEENYPYIVEREIEQYEKVRREELLKEVHLIEEYILEKVKDKEILKKGDNQNFKYYILNGLLKQLKNEDVESYKVFNLNTKPEDVNINQLKQEATDLEQKAFVLTYIRNKFAHNQLPKKEFWDYCQEKYGKIEKEKTYAEYFAEVFKREKEALMK

SEQ ID NO: 137 - protein, 1090 aa, Prevotella sp.
MNIPALVENQKKYFGTYSVMAMLNAQTVLDHIQKVADIEGEQNENNENLWFHPVMSHLYNAKNGYDKQPEKTMFIIERLQSYFPFLKIMAENQREYSNGKYKQNRVEVNSNDIFEVLKRAFGVLKMYRDLTNHYKTYEEKLIDGCEFLTSTEQPLSGMISKYYTVALRNTKERYGYKTEDLAFIQDNIKKITKDAYGKRKSQVNTGFFLSLQDYNGDTQKKLHLSGVGIALLICLFLDKQYINIFLSRLPIFSSYNAQSEERRIIIRSFGINSIKLPKDRIHSEKSNKSVAMDMLNEVKRCPDELFTTLSAEKQSRFRIISDDHNEVLMKRSTDRFVPLLLQYIDYGKLFDHIRFHVNMGKLRYLLKADKTCIDGQTRVRVIEQPLNGFGRLEEAETMRKQENGTFGNSGIRIRDFENVKRDDANPANYPYIVDTYTHYILENNKVEMFISDKGSSAPLLPLIEDDRYVVKTIPSCRMSTLEIPAMAFHMFLFGSKKTEKLIVDVHNRYKRLFQAMQKEEVTAENIASFGIAESDLPQKILDLISGNAHGKDVDAFIRLTVDDMLTDTERRIKRFKDDRKSIRSADNKMGKRGFKQISTGKLADFLAKDIVLFQPSVNDGENKITGLNYRIMQSAIAVYDSGDDYEAKQQFKLMFEKARLIGKGTTEPHPFLYKVFARSIPANAVDFYERYLIERKFYLTGLCNEIKRGNRVDVPFIRRDQNKWKTPAMKTLGRIYSEDLPVELPRQMFDNEIKSHLKSLPQMEGIDFNNANVTYLIAEYMKRVLNDDFQTFYQWKRNYHYMDMLKGEYDRKGSLQHCFTSVEEREGLWKERASRTERYRKLASNKIRSNRQMRNASSEEIETILDKRLSNCRNEYQKSEKVIRRYRVQDALLFLLAKKTLTELADFDGERFKLKEIMPDAEKGILSEIMPMSFTFEKGGKKYTITSEGMKLKNYGDFFVLASDKRIGNLLELVGSDIVSKEDIMEEFNKYDQCRPEISSIVFNLEKWAFDTYPELSARVDREEKVDFKSILKILLNNKNINKEQSDILRKIRNAFDHNNYPDKGIVEIKALPEIAMSIKKAFGEYAIMK

SEQ ID NO: 138 - protein, 1090 aa, Prevotella sp.
MNIPALVENQKKYFGTYSVMAMLNAQTVLDHIQKVADIEGEQNENNENLWFHPVMSHLYNAKNGYDKQPEKTMFIIERLQSYFPFLKIMAENQREYSNGKYKQNRVEVNSNDIFEVLKRAFGVLKMYRDQASHYKTYDEKLIDGCEFLTSTEQPLSGMINNYYTVALRNMNERYGYKTEDLAFIQDKRFKFVKDAYGKKKSQVNTGFFLSLQDYNGDTQKKLHLSGVGIALLICLFLDKQYINIFLSRLPIFSSYNAQSEERRIIIRSFGINSIKQPKDRIHSEKSNKSVAMDMLNEIKRCPNELFETLSAEKQSRFRIISNDHNEVLMKRSSDRFVPLLLQYIDYGKLFDHIRFHVNMGKLRYLLKADKTCIDGQTRVRVIEQPLNGFGRLEEVETMRKQENGTFGNSGIRIRDFENMKRDDANPANYPYIVDTYTHYILENNKVEMFISDEETPAPLLPVIEDDRYVVKTIPSCRMSTLEIPAMAFHMFLFGSKKTEKLIVDVHNRYKRLFKAMQKEEVTAENIASFGIAESDLPQKIIDLISGNAHGKDVDAFIRLTVDDMLADTERRIKRFKDDRKSIRSADNKMGKRGFKQISTGKLADFLAKDIVLFQPSVNDGENKITGLNYRIMQSAIAVYNSGDDYEAKQQFKLMFEKARLIGKGTTEPHPFLYKVFVRSIPANAVDFYERYLIERKFYLIGLSNEIKKGNRVDVPFIRRDQNKWKTPAMKTLGRIYDEDLPVELPRQMFDNEIKSHLKSLPQMEGIDFNNANVTYLIAEYMKRVLNDDFQTFYQWKRNYRYMDMLRGEYDRKGSLQSCFTSVEEREGLWKERASRTERYRKLASNKIRSNRQMRNASSEEIETILDKRLSNSRNEYQKSEKVIRRYRVQDALLFLLAKKTLTELADFDGERFKLKEIMPDAEKGILSEIMPMSFTFEKGGKKYTITSEGMKLKNYGDFFVLASDKRIGNLLELVGSDTVSKEDIMEEFKKYDQCRPEISSIVFNLEKWAFDTYPELSARVDREEKVDFKSILKILLNNKNINKEQSDILRKIRNAFDHNNYPDKGVVEIRALPEIAMSIKKAFGEYAIMK

SEQ ID NO: 139 - protein, 1090 aa, Prevotella sp.
MNIPALVENQKKYFGTYSVMAMLNAQTVLDHIQKVADIEGEQNENNENLWFHPVMSHLYNAKNGYDKQPEKTMFIIERLQSYFPFLKIMAENQREYSNGKYKQNRVEVNSNDIFEVLKRAFGVLKMYRDLTNHYKTYEEKLIDGCEFLTSTEQPFSGMISKYYTVALRNTKERYGYKAEDLAFIQDNRYKFTKDAYGKRKSQVNTGSFLSLQDYNGDTTKKLHLSGVGIALLICLFLDKQYINLFLSRLPIFSSYNAQSEERRIIIRSFGINSIKQPKDRIHSEKSNKSVAMDMLNEVKRCPDELFTTLSAEKQSRFRIISDDHNEVLMKRSSDRFVPLLLQYIDYGKLFDHIRFHVNMGKLRYLLKADKTCIDGQTRVRVIEQPLNGFGRLEEVETMRKQENGTFGNSGIRIRDFENMKRDDANPANYPYIVETYTHYILENNKVEMFISDEENPTPLLPVIEDDRYVVKTIPSCRMSTLEIPAMAFHMFLFGSEKTEKLIIDVHDRYKRLFQAMQKEEVTAENIASFGIAESDLPQKIMDLISGNAHGKDVDAFIRLTVDDMLTDTERRIKRFKDDRKSIRSADNKMGKRGFKQISTGKLADFLAKDIVLFQPSVNDGENKITGLNYRIMQSAIAVYDSGDDYEAKQQFKLMFEKARLIGKGTTEPHPFLYKVFVRSIPANAVDFYERYLIERKFYLIGLSNEIKKGNRVDVPFIRRDQNKWKTPAMKTLGRIYSEDLPVELPRQMFDNEIKSHLKSLPQMEGIDFNNANVTYLIAEYMKRVLNDDFQTFYQWKRNYRYMDMLRGEYDRKGSLQHCFTSIEEREGLWKERASRTERYRKLASNKIRSNRQMRNASSEEIETILDKRLSNCRNEYQKSEKIIRRYRVQDALLFLLAKKTLTELADFDGERFKLKEIMPDAEKGILSEIMPMSFTFEKGGKIYTITSGGMKLKNYGDFFVLASDKRIGNLLELVGSNTVSKEDIMEEFKKYDQCRPEISSIVFNLEKWAFDTYPELPARVDRKEKVDFWSILDVLSNNKDINNEQSYILRKIRNAFDHNNYPDKGIVEIKALPEIAMSIKKAFGEYAIMK

SEQ ID NO: 140 - protein, 1131 aa, Phaeodactylibacter xiamenensis
MTNTPKRRTLHRHPSYFGAFLNIARHNAFMIMEHLSTKYDMEDKNTLDEAQLPNAKLFGCLKKRYGKPDVTEGVSRDLRRYFPFLNYPLFLHLEKQQNAEQAATYDINPEDIEFTLKGFFRLLNQMRNNYSHYISNTDYGKFDKLPVQDIYEAAIFRLLDRGKHTKRFDVFESKHTRHLESNNSEYRPRSLANSPDHENTVAFVTCLFLERKYAFPFLSRLDCFRSTNDAAEGDPLIRKASHECYTMFCCRLPQPKLESSDILLDMVNELGRCPSALYNLLSEEDQARFHIKREEITGFEEDPDEELEQEIVLKRHSDRFPYFALRYFDDTEAFQTLRFDVYLGRWRTKPVYKKRIYGQERDRVLTQSIRTFTRLSRLLPIYENVKHDAVRQNEEDGKLVNPDVTSQFHKSWIQIESDDRAFLSDRIEHFSPHYNFGDQVIGLKFINPDRYAAIQNVFPKLPGEEKKDKDAKLVNETADAIISTHEIRSLFLYHYLSKKPISAGDERRFIQVDTETFIKQYIDTIKLFFEDIKSGELQPIADPPNYQKNEPLPYVRGDKEKTQEERAQYRERQKEIKERRKELNTLLQNRYGLSIQYIPSRLREYLLGYKKVPYEKLALQKLRAQRKEVKKRIKDIEKMRTPRVGEQATWLAEDIVFLTPPKMHTPERKTTKHPQKLNNDQFRIMQSSLAYFSVNKKAIKKFFQKETGIGLSNRETSHPFLYRIDVGRCRGILDFYTGYLKYKMDWLDDAIKKVDNRKHGKKEAKKYEKYLPSSIQHKTPLELDYTRLPVYLPRGLFKKAIVKALAAHADFQVEPEEDNVIFCLDQLLDGDTQDFYNWQRYYRSALTEKETDNQLVLAHPYAEQILGTIKTLEGKQKNNKLGNKAKQKIKDELIDLKRAKRRLLDREQYLRAVQAEDRALWLMIQERQKQKAEHEEIAFDQLDLKNITKILTESIDARLRIPDTKVDITDKLPLRRYGDLRRVAKDRRLVNLASYYHVAGLSEIPYDLVKKELEEYDRRRVAFFEHVYQFEKEVYDRYAAELRNENPKGESTYFSHWEYVAVAVKHSADTHFNELFKEKVMQLRNKFHHNEFPYFDWLLPEVEKASAALYADRVFDVAEGYYQKMRKLMRQ

SEQ ID NO: 141 - protein, 1155 aa, Flavorbacterium sp.
MDNNITVEKTELGLGITYNHDKVEDKHYFGGFFNLAQNNIDLVAQEFKKRLLIQGKDSINIFANYFSDQCSITNLERGIKILAEYFPVVSYIDLDEKNKSKSIREHLILLLETINNLRNYYTHYYHKKIIIDGSLFPLLDTILLKVVLEIKKKKLKEDKTKQLLKKGLEKEMTILFNLMKAEQKEKKIKGWNIDENIKGAVLNRAFSHLLYNDELSDYRKSKYNTEDETLKDTLTESGILFLLSFFLNKKEQEQLKANIKGYKGKIASIPDEEITLKNNSLRNMATHWTYSHLTYKGLKHRIKTDHEKETLLVNMVDYLSKVPHEIYQNLSEQNKSLFLEDINEYMRDNEENHDSSEASRVIHPVIRKRYENKFAYFAIRFLDEFAEFPTLRFMVNVGNYIHDNRKKDIGGTSLITNRTIKQQINVFGNLTEIHKKKNDYFEKEENKEKTLEWELFPNPSYHFQKENIPIFIDLEKSKETNDLAKEYAKEKKKIFGSSRKKQQNTAKKNRETIINLVFDKYKTSDRKTVTFEQPTALLSFNELNSFLYAFLVENKTGKELEKIIIEKIANQYQILKNCSSTVDKTNDNIPKSIKKIVNTTTDSFYFEGKKIDIEKLEKDITIEIEKTNEKLETIKENEESAQNYKRNERNTQKRKLYRKYVFFTNEIGIEATWITNDILRFLDNKENWKGYQHSELQKFISQYDNYKKEALGLLESEWNLESDAFFGQNLKRMFQSNSTFETFYKKYLDNRKNTLETYLSAIENLKTMTDVRPKVLKKKWTELFRFFDKKIYLLSTIETKINELITKPINLSRGIFEEKPTFINGKNPNKENNQHLFANWFIYAKKQTILQDFYNLPLEQPKAITNLKKHKYKLERSINNLKIEDIYIKQMVDFLYQKLFEQSFIGSLQDLYTSKEKREIEKGKAKNEQTPDESFIWKKQVEINTHNGRIIAKTKIKDIGKFKNLLTDNKIAHLISYDDRIWDFSLNNDGDITKKLYSINTELESYETIRREKLLKQIQQFEQFLLEQETEYSAERKHPEKFEKDCNPNFKKYIIEGVLNKIIPNHEIEEIEILKSKEDVFKINFSDILILNNDNIKKGYLLIMIRNKFAHNQLIDKNLFNFSLQLYSKNENENFSEYLNKVCQNIIQEFKEKLK

SEQ ID NO: 142 - protein, 1175 aa, Porphyromonas gulae
MTEQSERPYNGTYYTLEDKHFWAAFLNLARHNAYITLTHIDRQLAYSKADITNDQDVLSFKALWKNFDNDLERKSRLRSLILKHFSFLEGAAYGKKLFESKSSGNKSSKNKELTKKEKEELQANALSLDNLKSILFDFLQKLKDFRNYYSHYRHSESSELPLFDGNMLQRLYNVFDVSVQRVKRDHEHNDKVDPHRHFNHLVRKGKKDRYGHNDNPSFKHHFVDSEGMVTEAGLLFFVSLFLEKRDAIWMQKKIRGFKGGTETYQQMTNEVFCRSRISLPKLKLESLRTDDWMLLDMLNELVRCPKPLYDRLREKDRARFRVPVDILPDEDDTDGGGEDPFKNTLVRHQDRFPYFALRYFDLKKVFTSLRFHIDLGTYHFAIYKKMIGEQPEDRHLTRNLYGFGRIQDFAEEHRPEEWKRLVRDLDYFETGDKPYISQTTPHYHIEKGKIGLRFMPEGQHLWPSPEVGTTRTGRSKYAQDKRLTAEAFLSVHELMPMMFYYFLLREKYSEEVSAEKVQGRIKRVIEDVYAIYDAFARDEINTLKELDACLADKGIRRGHLPKQMIAILSQEHKDMEEKIRKKLQEMIADTDHRLDMLDRQTDRKIRIGRKNAGLPKSGVIADWLVRDMMRFQPVAKDTSGKPLNNSKANSTEYRMLQRALALFGGEKKRLTPYFRQMNLTGGNNPHPFLHETRWESHTNILSFYRSYLRARKAFLERIGRSDRMENRPFLLLKEPKTDRQTLVAGWKSEFHLPRGIFTEAVRDCLIEMGYDEVGSYREVGFMAKAVPLYFERACEDRVQPFYDSPFNVGNSLKPKKGRFLSKEERAEEWERGKERFRDLEAWSHSAARRIEDAFAGIEYASPGNKKKIEQLLRDLSLWEAFESKLKVRADKINLAKLKKEILEAQEHPYHDFKSWQKFERELRLVKNQDIITWMMCRDLMEENKVEGLDTGTLYLKDIRPNVQEQGSLNVLNRVKPMRLPVVVYRADSRGHVHKEEAPLATVYIEERDTKLLKQGNFKSFVKDRRLNGLFSFVDTGGLAMEQYPISKLRVEYELAKYQTARVCVFELTLRLEESLLTRYPHLPDESFRKMLESWSDPLLAKWPELHGKVRLLIAVRNAFSHNQYPMYDEAVFSSIRKYDPSSPDAIEERMGLNIAHRLSEEVKQAKETVERIIQV

SEQ ID NO: 143 - protein, 1145 aa, Chryseobacterium sp.
METQTIGHGIAYDHSKIQDKHFFGGFLNLAENNIKAVLKAFSEKFNVGNVDVKQFADVSLKDNLPDNDFQKRVSFLKMYFPVVDFINIPNNRAKFRSDLTTLFKSVDQLRNFYTHYYHKPLDFDASLFILLDDIFARTAKEVRDQKMKDDKTRQLLSKSLSEELQKGYELQLERLKELNRLGKKVNIHDQLGIKNGVLNNAFNHLIYKDGESFKTKLTYSSALTSFESAENGIEISQSGLLFLLSMFLKRKEIEDLKNRNKGFKAKVVIDEDGKVNGLKFMATHWVFSYLCFKGLKSKLSTEFHEETLLIQIIDELSKVPDELYCAFDKETRDKFIEDINEYVKEGHQDFSLEDAKVIHPVIRKRYENKFNYFAIRFLDEFVKFPSLRFQVHVGNYVHDRRIKNIDGTTFETERVVKDRIKVFGRLSEISSYKAQYLSSVSDKHDETGWEIFPNPSYVFINNNIPIHISVDTSFKKEIADFKKLRRAQVPDELKIRGAEKKRKFEITQMIGSKSVLNQEEPIALLSLNEIPALLYEILINGKEPAEIERIIKDKLNERQDVIKNYNPENWLPASQISRRLRSNKGERIINTDKLLQLVTKELLVTEQKLKIISDNREALKQKKEGKYIRKFIFTNSELGREAIWLADDIKRFMPADVRKEWKGYQHSQLQQSLAFYNSRPKEALAILESSWNLKDEKIIWNEWILKSFTQNKFFDAFYNEYLKGRKKYFAFLSEHIVQYTSNAKNLQKFIKQQMPKDLFEKRHYIIEDLQTEKNKILSKPFIFPRGIFDKKPTFIKGVKVEDSPESFANWYQYGYQKDHQFQKFYDWKRDYSDVFLEHLGKPFINNGDRRTLGMEELKERIIIKQDLKIKKIKIQDLFLRLIAENLFQKVFKYSAKLPLSDFYLTQEERMEKENMAALQNVREEGDKSPNIIKDNFIWSKMIPYKKGQIIENAVKLKDIGKLNVLSLDDKVQTLLSYDDAKPWSKIALENEFSIGENSYEVIRREKLFKEIQQFESEILFRSGWDGINHPAQLEDNRNPKFKMYIVNGILRKSAGLYSQGEDIWFEYNADFNNLDADVLETKSELVQLAFLVTAIRNKFAHNQLPAKEFYFYIRAKYGFADEPSVALVYLNFTKYAINEFKKVMI

SEQ ID NO: 144 - protein, 948 aa, Riemerella anatipestifer
MFFSFHNAQRVIFKHLYKAFDASLRMVKEDYKAHFTVNLTRDFAHLNRKGKNKQDNPDFNRYRFEKDGFFTESGLLFFTNLFLDKRDAYWMLKKVSGFKASHKQREKMTTEVFCRSRILLPKLRLESRYDHNQMLLDMLSELSRCPKLLYEKLSEENKKHFQVEADGFLDEIEEEQNPFKDTLIRHQDRFPYFALRYLDLNESFKSIRFQVDLGTYHYCIYDKKIGDEQEKRHLTRTLLSFGRLQDFTEINRPQEWKALTKDLDYKETSNQPFISKTTPHYHITDNKIGFRLGTSKELYPSLEIKDGANRIAKYPYNSGFVAHAFISVHELLPLMFYQHLTGKSEDLLKETVRHIQRIYKDFEEERINTIEDLEKANQGRLPLGAFPKQMLGLLQNKQPDLSEKAKIKIEKLIAETKLLSHRLNTKLKSSPKLGKRREKLIKTGVLADWLVKDFMRFQPVAYDAQNQPIKSSKANSTEFWFIRRALALYGGEKNRLEGYFKQTNLIGNTNPHPFLNKFNWKACRNLVDFYQQYLEQREKFLEAIKNQPWEPYQYCLLLKIPKENRKNLVKGWEQGGISLPRGLFTEAIRETLSEDLMLSKPIRKEIKKHGRVGFISRAITLYFKEKYQDKHQSFYNLSYKLEAKAPLLKREEHYEYWQQNKPQSPTESQRLELHTSDRWKDYLLYKRWQHLEKKLRLYRNQDVMLWLMTLELTKNHFKELNLNYHQLKLENLAVNVQEADAKLNPLNQTLPMVLPVKVYPATAFGEVQYHKTPIRTVYIREEHTKALKMGNFKALVKDRRLNGLFSFIKEENDTQKHPISQLRLRRELEIYQSLRVDAFKETLSLEEKLLNKHTSLSSLENEFRALLEEWKKEYAASSMVTDEHIAFIASVRNAFCHNQYPFYKEALHAPIPLFTVAQPTTEEKDGLGIAEALLKVLREYCEIVKSQI

SEQ ID NO: 145 - protein, 1175 aa, Porhyromonas gingivalis
MTEQNEKPYNGTYYTLEDKHFWAAFFNLARHNAYITLAHIDRQLAYSKADITNDEDILFFKGQWKNLDNDLERKARLRSLILKHFSFLEGAAYGKKLFESQSSGNKSSKKKELTKKEKEELQANALSLDNLKSILFDFLQKLKDFRNYYSHYRHPESSELPLFDGNMLQRLYNVFDVSVQRVKRDHEHNDKVDPHRHFNHLVRKGKKDKYGNNDNPFFKHHFVDREEKVTEAGLLFFVSLFLEKRDAIWMQKKIRGFKGGTEAYQQMTNEVFCRSRISLPKLKLESLRTDDWMLLDMLNELVRCPKLLYDRLREEDRARFRVPVDILSDEDDTDGTEEDPFKNTLVRHQDRFPYFALRYFDLKKVFTSLRFHIDLGTYHFAIYKKNIGEQPEDRHLTRNLYGFGRIQDFAEEHRPEEWKRLVRDLDYFETGDKPYITQTTPHYHIEKGKIGLRFVPEGQLLWPSPEVGATRTGRSKYAQDKRFTAEAFLSVHELMPMMFYYFLLREKYSEEASAEKVQGRIKRVIEDVYAVYDAFARDEINTRDELDACLADKGIRRGHLPRQMIAILSQEHKDMEEKVRKKLQEMIADTDHRLDMLDRQTDRKIRIGRKNAGLPKSGVIADWLVRDMMRFQPVAKDTSGKPLNNSKANSTEYRMLQRALALFGGEKERLTPYFRQMNLTGGNNPHPFLHETRWESHTNILSFYRSYLKARKAFLQSIGRSDREENHRFLLLKEPKTDRQTLVAGWKSEFHLPRGIFTEAVRDCLIEMGYDEVGSYKEVGFMAKAVPLYFERACKDRVQPFYDYPFNVGNSLKPKKGRFLSKEKRAEEWESGKERFRDLEAWSHSAARRIEDAFVGIEYASWENKKKIEQLLQDLSLWETFESKLKVKADKINIAKLKKEILEAKEHPYHDFKSWQKFERELRLVKNQDIITWMMCRDLMEENKVEGLDTGTLYLKDIRTDVQEQGSLNVLNHVKPMRLPVVVYRADSRGHVHKEEAPLATVYIEERDTKLLKQGNFKSFVKDRRLNGLFSFVDTGALAMEQYPISKLRVEYELAKYQTARVCAFEQTLELEESLLTRYPHLPDESFREMLESWSDPLLDKWPDLQREVRLLIAVRNAFSHNQYPMYDETIFSSIRKYDPSSLDAIEERMGLNIAHRLSEEVKLAKEMVERIIQA

SEQ ID NO: 146 - protein, 1175 aa, Porphyromonas gingivalis
MTEQNEKPYNGTYYTLKDKHFWAAFFNLARHNAYITLTHIDRQLAYSKADITNDEDILFFKGQWKNLDNDLERKARLRSLILKHFSFLEGAAYGKKLFESQSSGNKSSKKKELTKKEKEELQANALSLDNLKSILFDFLQKLKDFRNYYSHYRHPESSELPMFDGNMLQRLYNVFDVSVQRVKRDHEHNDKVDPHRHFNHLVRKGKKDRCGNNDNPFFKHHFVDREGKVTEAGLLFFVSLFLEKRDAIWMQKKIRGFKGGTETYQQMTNEVFCRSRISLPKLKLESLRTDDWMLLDMLNELVRCPKSLYDRLREEDRACFRVPVDILSDEDDTDGAEEDPFKNTLVRHQDRFPYFALRYFDLKKVFTSLRFHIDLGTYHFAIYKKNIGEQPEDRHLTRNLYGFGRIQDFAEEHRPEEWKRLVRDLDCFETGDKPYITQTTPHYHIEKGKIGLRFVPEGQHLWPSPEVGATRTGRSKYAQDKRFTAEAFLSVHELMPMMFYYFLLREKYSEEVSAERVQGRIKRVIEDVYAVYDAFARDEINTRDELDACLADKGIRRGHLPRQMIAILSQKHKDMEEKVRKKLQEMIADTDHRLDMLDRQTDRKIRIGRKNAGLPKSGVIADWLVRDMMRFQPVAKDTSGKPLNNSKANSTEYRMLQRALALFGGEKERLTPYFRQMNLTGGNNPHPFLHETRWESHTNILSFYRSYLKARKAFLQSIGRSDRVENHRFLLLKEPKTDRQTLVAGWKGEFHLPRGIFTEAVRDCLIEMGLDEVGSYKEVGFMAKAVPLYFERACKDRVQPFYDYPFNVGNSLKPKKGRFLSKEKRAEEWESGKERFRDLEAWSHSAARRIEDAFAGIENASRENKKKIEQLLQDLSLWETFESKLKVKADKINIAKLKKEILEAKEHPYLDFKSWQKFERELRLVKNQDIITWMMCRDLMEENKVEGLDTGTLYLKDIRTDVQEQGSLNVLNHVKPMRLPVVVYRADSRGHVHKEQAPLATVYIEERDTKLLKQGNFKSFVKDRRLNGLFSFVDTGALAMEQYPISKLRVEYELAKYQTARVCAFEQTLELEESLLTRYPHLPDENFRKMLESWSDPLLDKWPDLHRKVRLLIAVRNAFSHNQYPMYDEAVFSSIRKYDPSSPDAIEERMGLNIAHRLSEEVKQAKEMAERIIQA

SEQ ID NO: 147 - protein, 1213 aa, Flavobacterium colunare
MSSKNESYNKQKTFNHYKQEDKYFFGGFLNNADDNLRQVGKEFKTRINFNHNNNELASVFKDYFNKEKSVAKREHALNLLSNYFPVLERIQKHTNHNFEQTREIFELLLDTIKKLRDYYTHHYHKPITINPKVYDFLDDTLLDVLITIKKKKVKNDTSRELLKEKFRPELTQLKNQKREELIKKGKKLLEENLENAVFNHCLRPFLEENKTDDKQNKTVSLRKYRKSKPNEETSITLTQSGLVFLISFFLHRKEFQVFTSGLEGFKAKVNTIKEEEISLNKNNIVYMITHWSYSYYNFKGLKHRIKTDQGVSTLEQNNTTHSLTNTNTKEALLTQIVDYLSKVPNEIYETLSEKQQKEFEEDINEYMRENPENEDSTFSSIVSHKVIRKRYENKFNYFAMRFLDEYAELPTLRFMVNFGDYIKDRQKKILESIQFDSERIIKKEIHLFEKLGLVTEYKKNVYLKETSNIDLSRFPLFPSPSYVMANNNIPFYIDSRSNNLDEYLNQKKKAQSQNRKRNLTFEKYNKEQSKDAIIAMLQKEIGVKDLQQRSTIGLLSCNELPSMLYEVIVKDIKGAELENKIAQKIREQYQSIRDFTLDSPQKDNIPTTLTKTISTDTSVTFENQPIDIPRLKNALQKELTLTQEKLLNVKQHEIEVDNYNRNKNTYKFKNQPKDKVDDNKLQRKYVFYRNEIGQEANWLASDLIHFMKNKSLWKGYMHNELQSFLAFFEDKKNDCIALLETVFNLKEDCILTKDLKNLFLKHGNFIDFYKEYLKLKEDFLNTESTFLENGFIGLPPKILKKELSKRLNYIFIVFQKRQFIIKELEEKKNNLYADAINLSRGIFDEKPTMIPFKKPNPDEFASWFVASYQYNNYQSFYELTPDKIENDKKKKYKNLRAINKVKIQDYYLKLMVDTLYQDLFNQPLDKSLSDFYVSKTDREKIKADAKAYQKRNDSFLWNKVIHLSLQNNRITANPKLKDIGKYKRALQDEKIATLLTYDDRTWTYALQKPEKENENDYKELHYTALNMELQEYEKVRSKKLLKQVQELEKQILDKFYDFSNNATHPEDLEIEDKKGKRHPNFKLYITKALLKNESEIINLENIDIEILIKYYDYNTEKLKEKIKNMDEDEKAKIVNTKENYNKITNVLIKKALVLIIIRNKMAHNQYPPKFIYDLATRFVPKKEEEYFACYFNRVFETITTELWENKKKAKEIV

SEQ ID NO: 148 - protein, 1119 aa, Porphyromonas gingivalis
MTEQNERPYNGTYYTLEDKHFWAAFFNLARHNAYITLTHIDRQLAYSKADITNDEDILFFKGQWKNLDNDLERKARLRSLILKHFSFLEGAAYGKKLFENKSSGNKSSKKKELTKKEKEELQANALSLDNLKSILFDFLQKLKDFRNYYSHYRHPESSELPLFDGNMLQRLYNVFDVSVQRVKRDHEHNDKVDPHRHFNHLVRKGKKDRCGNNDNPFFKHHFVDREGKVTEAGLLFFVSLFLEKRDAIWMQKKIRGFKGGTEAYQQMTNEVFCRSRISLPKLKLESLRTDDWMLLDMLNELVRCPKSLYDRLREEDRARFRVPVDILSDEDDTDGTEEDPFKNTLVRHQDRFPYFALRYFDLKKVFTSLRFHIDLGTYHFAIYKKNIGEQPEDRHLTRNLYGFGRIQDFAEEHRPEEWKRLVRDLDYFETGDKPYITQTTPHYHIEKGKIGLRFVPEGQHLWPSPEVGATRTGRSKYAQDKRLTAEAFLSVHELMPMMFYYFLLREKYSEEVSAEKVQGRIKRVIEDVYAVYDAFARGEIDTLDRLDACLADKGIRRGHLPRQMIAILSQEHKDMEEKVRKKLQEMIADTDHRLDMLDRQTDRKIRIGRKNAGLPKSGVIADWLVRDMMRFQPVAKDTSGKPLNNSKANSTEYRMLQRALALFGGEKERLTPYFRQMNLTGGNNPHPFLHETRWESHTNILSFYRSYLKARKAFLQSIGRSDREENHRFLLLKEPKTDRQTLVAGWKSEFHLPRGIFTEAVRDCLIEMGYDEVGSYKEVGFMAKAVPLYFERACKDRVQPFYDYPFNVGNSLKPKKGRFLSKEKRAEEWESGKERFRLAKLKKEILEAKEHPYLDFKSWQKFERELRLVKNQDIITWMMCRDLMEENKVEGLDTGTLYLKDIRTEVQEQGSLNVLNRVKPMRLPVVVYRADSRGHVHKEQAPLATVYIEERDTKLLKQGNFKSFVKDRRLNGLFSFVDTGGLAMEQYPISKLRVEYELAKYQTARVCAFEQTLELEESLLTRCPHLPDKNFRKMLESWSDPLLDKWPDLQREVWLLIAVRNAFSHNQYPMYDEAVFSSIRKYDPSSPDAIEERMGLNIAHRLSEEVKQAKEMAERIIQA

SEQ ID NO: 149 - protein, 1135 aa, Porphyromonas gingivalis
MNTVPASENKGQSRTVEDDPQYFGLYLNLARENLIEVESHVRIKFGKKKLNEESLKQSLLCDHLLSVDRWTKVYGHSRRYLPFLHYFDPDSQIEKDHDSKTGVDPDSAQRLIRELYSLLDFLRNDFSHNRLDGTTFEHLEVSPDISSFITGTYSLACGRAQSRFADFFKPDDFVLAKNRKEQLISVADGKECLTVSGLAFFICLFLDREQASGMLSRIRGFKRTDENWARAVHETFCDLCIRHPHDRLESSNTKEALLLDMLNELNRCPRILYDMLPEEERAQFLPALDENSMNNLSENSLNEESRLLWDGSSDWAEALTKRIRHQDRFPYLMLRFIEEMDLLKGIRFRVDLGEIELDSYSKKVGRNGEYDRTITDHALAFGKLSDFQNEEEVSRMISGEASYPVRFSLFAPRYAIYDNKIGYCHTSDPVYPKSKTGEKRALSNPQSMGFISVHDLRKLLLMELLCEGSFSRMQSGFLRKANRILDETAEGKLQFSALFPEMRHRFIPPQNPKSKDRREKAETTLEKYKQEIKGRKDKLNSQLLSAFDMNQRQLPSRLLDEWMNIRPASHSVKLRTYVKQLNEDCRLRLRKFRKDGDGKARAIPLVGEMATFLSQDIVRMIISEETKKLITSAYYNEMQRSLAQYAGEENRRQFRAIVAELHLLDPSSGHPFLSATMETAHRYTEDFYKCYLEKKREWLAKTFYRPEQDENTKRRISVFFVPDGEARKLLPLLIRRRMKEQNDLQDWIRNKQAHPIDLPSHLFDSKIMELLKVKDGKKKWNEAFKDWWSTKYPDGMQPFYGLRRELNIHGKSVSYIPSDGKKFADCYTHLMEKTVQDKKRELRTAGKPVPPDLAADIKRSFHRAVNEREFMLRLVQEDDRLMLMAINKMMTDREEDILPGLKNIDSILDKENQFSLAVHAKVLEKEGEGGDNSLSLVPATIEIKSKRKDWSKYIRYRYDRRVPGLMSHFPEHKATLDEVKTLLGEYDRCRIKIFDWAFALEGAIMSDRDLKPYLHESSSREGKSGEHSTLVKMLVEKKGCLTPDESQYLILIRNKAAHNQFPCAAEMPLIYRDVSAKVGSIEGSSAKDLPEGSSLVDSLWKKYEMIIRKILPILDPENRFFGKLLNNMSQPINDL

SEQ ID NO: 150 - protein, 950 aa, Riemerella anatipestifer
MFFSFHNAQRVIFKHLYKAFDASLRMVKEDYKAHFTVNLTRDFAHLNRKGKNKQDNPDFNRYRFEKDGFFTESGLLFFTNLFLDKRDAYWMLKKVSGFKASHKQSEKMTTEVFCRSRILLPKLRLESRYDHNQMLLDMLSELSRCPKLLYEKLSEKDKKCFQVEADGFLDEIEEEQNPFKDTLIRHQDRFPYFALRYLDLNESFKSIRFQVDLGTYHYCIYDKKIGYEQEKRHLTRTLLNFGRLQDFTEINRPQEWKALTKDLDYNETSNQPFISKTTPHYHITDNKIGFRLRTSKELYPSLEVKDGANRIAKYPYNSDFVAHAFISISVHELLPLMFYQHLTGKSEDLLKETVRHIQRIYKDFEEERINTIEDLEKANQGRLPLGAFPKQMLGLLQNKQPDLSEKAKIKIEKLIAETKLLSHRLNTKLKSSPKLGKRREKLIKTGVLADWLVKDFMRFQPVVYDAQNQPIKSSKANSTESRLIRRALALYGGEKNRLEGYFKQTNLIGNTNPHPFLNKFNWKACRNLVDFYQQYLEQREKFLEAIKHQPWEPYQYCLLLKVPKENRKNLVKGWEQGGISLPRGLFTEAIRETLSKDLTLSKPIRKEIKKHGRVGFISRAITLYFKEKYQDKHQSFYNLSYKLEAKAPLLKKEEHYEYWQQNKPQSPTESQRLELHTSDRWKDYLLYKRWQHLEKKLRLYRNQDIMLWLMTLELTKNHFKELNLNYHQLKLENLAVNVQEADAKLNPLNQTLPMVLPVKVYPTTAFGEVQYHETPIRTVYIREEQTKALKMGNFKALVKDRHLNGLFSFIKEENDTQKHPISQLRLRRELEIYQSLRVDAFKETLSLEEKLLNKHASLSSLENEFRTLLEEWKKKYAASSMVTDKHIAFIASVRNAFCHNQYPFYKETLHAPILLFTVAQPTTEEKDGLGIAEALLRVLREYCEIVKSQI

SEQ ID NO: 151 - protein, 1213 aa, Flavobacterium columnare
MSSKNESYNKQKTFNHYKQEDKYFFGGFLNNADDNLRQVGKEFKTRINFNHNNNELASVFKDYFNKEKSVAKREHALNLLSNYFPVLERIQKHTNHNFEQTREIFELLLDTIKKLRDYYTHHYHKPITINPKIYDFLDDTLLDVLITIKKKKVKNDTSRELLKEKLRPELTQLKNQKREELIKKGKKLLEENLENAVFNHCLRPFLEENKTDDKQNKTVSLRKYRKSKPNEETSITLTQSGLVFLMSFFLHRKEFQVFTSGLEGFKAKVNTIKEEKISLNKNNIVYMITHWSYSYYNFKGLKHRIKTDQGVSTLEQNNTTHSLTNTNTKEALLTQIVDYLSKVPNEIYETLSEKQQKEFEEDINEYMRENPENEDSTFSSIVSHKVIRKRYENKFNYFAMRFLDEYAELPTLRFMVNFGDYIKDRQKKILESIQFDSERIIKKEIHLFEKLGLVTEYKKNVYLKETSNIDLSRFPLFPSPSYVMANNNIPFYIDSRSNNLDEYLNQKKKAQSQNRKRNLTFEKYNKEQSKDAIIAMLQKEIGVKDLQQRSTIGLLSCNELPSMLYEVIVKDIKGAELENKIAQKIREQYQSIRDFTLNSPQKDNIPTTLIKTISTDTSVTFENQPIDIPRLKNAIQKELALTQEKLLNVKQHEIEVNNYNRNKNTYKFKNQPKDKVDDNKLQRKYVFYRNEIGQEANWLASDLIHFMKNKSLWKGYMHNELQSFLAFFEDKKNDCIALLETVFNLKEDCILTKDLKNLFLKHGNFIDFYKEYLKLKEDFLNTESTFLENGFIGLPPKILKKELSKRLNYIFIVFQKRQFIIKELEEKKNNLYADAINLSRGIFDEKPTMIPFKKPNPDEFASWFVASYQYNNYQSFYELTPDKIENDKKKKYKNLRAINKVKIQDYYLKLMVDTLYQDLFNQPLDKSLSDFYVSKTDREKIKADAKAYQKRNDSFLWNKVIHLSLQNNRITANPKLKDIGKYKRALQDEKIATLLTYDDRTWTYALQKPEKENENDYKELHYTALNMELQEYEKVRSKKLLKQVQELEKQILDKFYDFSNNATHPEDLEIEDKKGKRHPNFKLYITKALLKNESEIINLENIDIEILIKYYDYNTEKLKEKIKNMDEDEKAKIVNTKENYNKITNVLIKKALVLIIIRNKMAHNQYPPKFIYDLATRFVPKKEEEYFACYFNRVFETITTELWENKKKAKEIV

SEQ ID NO: 152 - protein, 1095 aa, Riemerella anatipestifer
MEKPLPPNVYTLKHKFFWGAFLNIARHNAFITICHINEQLGLTTPPNDDKIADVVCGTWNNILNNDHDLLKKSQLTELILKHFPFLAAMCYHPPKKEGKKKGSQKEQQKEKENEAQSQAEALNPSELIKVLKTLVKQLRTLRNYYSHHSHKKPDAEKDIFKHLYKAFDASLRMVKEDYKAHFTVNLTQDFAHLNRKGKNKQDNPDFDRYRFEKDGFFTESGLLFFTNLFLDKRDAYWMLKKVSGFKASHKQSEKMTTEVFCRSRILLPKLRLESRYDHNQMLLDMLSELSRYPKLLYEKLSEEDKKRFQVEADGFLDEIEEEQNPFKDTLIRHQDRFPYFALRYLDLNESFKSIRFQVDLGTYHYCIYDKKIGDEQEKRHLTRTLLSFGRLQDFTEINRPQEWKALTKDLDYKETSKQPFISKTTPHYHITDNKIGFRLGTSKELYPSLEVKDGANRIAQYPYNSDFVAHAFISVHELLPLMFYQHLTGKSEDLLKETVRHIQRIYKDFEEERINTIEDLEKANQGRLPLGAFPKQMLGLLQNKQPDLSEKAKIKIEKLIAETKLLSHRLNTKLKSSPKLGKRREKLIKTGVLADWLVKDFMRFQPVAYDAQNQPIESSKANSTEFQLIQRALALYGGEKNRLEGYFKQTNLIGNTNPHPFLNKFNWKACRNLVDFYQQYLEQREKFLEAIKNQPWEPYQYCLLLKIPKENRKNLVKGWEQGGISLPRGLFTEAIRETLSKDLTLSKPIRKEIKKHGRVGFISRAITLYFREKYQDDHQSFYDLPYKLEAKASPLPKKEHYEYWQQNKPQSPTELQRLELHTSDRWKDYLLYKRWQHLEKKLRLYRNQDVMLWLMTLELTKNHFKELNLNYHQLKLENLAVNVQEADAKLNPLNQTLPMVLPVKVYPATAFGEVQYQETPIRTVYIREEQTKALKMGNFKALVKDRRLNGLFSFIKEENDTQKHPISQLRLRRELEIYQSLRVDAFKETLNLEEKLLKKHTSLSSVENKFRILLEEWKKEYAASSMVTDEHIAFIASVRNAFCHNQYPFYEEALHAPIPLFTVAQQTTEEKDGLGIAEALLRVLREYCEIVKSQI

SEQ ID NO: 153 - protein, 1149 aa, Sinomicrobium oceani
MESTTTLGLHLKYQHDLFEDKHYFGGGVNLAVQNIESIFQAFAERYGIQNPLRKNGVPAINNIFHDNISISNYKEYLKFLKQYLPVVGFLEKSNEINIFEFREDFEILINAIYKLRHFYTHYYHSPIKLEDRFYTCLNELFVAVAIQVKKHKMKSDKTRQLLNKNLHQLLQQLIEQKREKLKDKKAEGEKVSLDTKSIENAVLNDAFVHLLDKDENIRLNYSSRLSEDIITKNGITLSISGLLFLLSLFLQRKEAEDLRSRIEGFKGKGNELRFMATHWVFSYLNVKRIKHRLNTDFQKETLLIQIADELSKVPDEVYKTLDHENRSKFLEDINEYIREGNEDASLNESTVVHGVIRKRYENKFHYLVLRYLDEFVDFPSLRFQVHLGNYIHDRRDKVIDGTNFITNRVIKEPIKVFGKLSHVSKLKSDYMESLSREHKNGWDVFPNPSYNFVGHNIPIFINLRSASSKGKELYRDLMKIKSEKKKKSREEGIPMERRDGKPTKIEISNQIDRNIKDNNFKDIYPGEPLAMLSLNELPALLFELLRRPSITPQDIEDRMVEKLYERFQIIRDYKPGDGLSTSKISKKLRKADNSTRLDGKKLLRAIQTETRNAREKLHTLEENKALQKNRKRRTVYTTREQGREASWLAQDLKRFMPIASRKEWRGYHHSQLQQILAFYDQNPKQPLELLEQFWDLKEDTYVWNSWIHKSLSQHNGFVPMYEGYLKGRLGYYKKLESDIIGFLEEHKVLKRYYTQQHLNVIFRERLYFIKTETKQKLELLARPLVFPRGIFDDKPTFVQDKKVVDHPELFADWYVYSYKDDHSFQEFYHYKRDYNEIFETELSWDIDFKDNKRQLNPSEQMDLFRMKWDLKIKKIKIQDIFLKIVAEDIYLKIFGHKIPLSLSDFYISRQERLTLDEQAVAQSMRLPGDTSENQIKESNLWQTTVPYEKEQIREPKIKLKDIGKFKYFLQQQKVLNLLKYDPQHVWTKAELEEELYIGKHSYEVVRREMLLQKCHQLEKHILEQFRFDGSNHPRELEQGNHPNFKMYIVNGILTKRGELEIEAENWWLELGNSKNSLDKVEVELLTMKTIPEQKAFLLILIRNKFAHNQLPADNYFHYASNLMNLKKSDTYSLFWFTVADTIVQEFMSL

SEQ ID NO: 154 - protein, 1133 aa, Reichenbachiella agariperforans
MKTNPLIASSGEKPNYKKFNTESDKSFKKIFQNKGSIAPIAEKACKNFEIKSKSPVNRDGRLHYFSVGHAFKNIDSKNVFRYELDESQMDMKPTQFLALQKEFFDFQGALNGLLKHIRNVNSHYVHTFEKLEIQSINQKLITFLIEAFELAVIHSYLNEEELSYEAYKDDPQSGQKLVQFLCDKFYPNKEHEVEERKTILAKNKRQALEHLLFIEVTSDIDWKLFEKHKVFTISNGKYLSFHACLFLLSLFLYKSEANQLISKIKGFKRNDDNQYRSKRQIFTFFSKKFTSQDVNSEEQHLVKFRDVIQYLNHYPSAWNKHLELKSGYPQMTDKLMRYIVEAEIYRSFPDQTDNHRFLLFAIREFFGQSCLDTWTGNTPINFSNQEQKGFSYEINTSAEIKDIETKLKALVLKGPLNFKEKKEQNRLEKDLRREKKEQPTNRVKEKLLTRIQHNMLYVSYGRNQDRFMDFAARFLAETDYFGKDAKFKMYQFYTSDEQRDHLKEQKKELPKKEFEKLKYHQSKLVDYFTYAEQQARYPDWDTPFVVENNAIQIKVTLFNGAKKIVSVQRNLMLYLLEDALYSEKRENAGKGLISGYFVHHQKELKDQLDILEKETEISREQKREFKKLLPKRLLHRYSPAQINDTTEWNPMEVILEEAKAQEQRYQLLLEKAILHQTEEDFLKRNKGKQFKLRFVRKAWHLMYLKELYMNKVAEHGHHKSFHITKEEFNDFCRWMFAFDEVPKYKEYLCDYFSQKGFFNNAEFKDLIESSTSLNDLYEKTKQRFEGWSKDLTKQSDENKYLLANYESMLKDDMLYVNISHFISYLESKGKINRNAHGHIAYKALNNVPHLIEEYYYKDRLAPEEYKSHGKLYNKLKTVKLEDALLYEMAMHYLSLEPALVPKVKTKVKDILSSNIAFDIKDAAGHHLYHLLIPFHKIDSFVALINHQSQQEKDPDKTSFLAKIQPYLEKVKNSKDLKAVYHYYKDTPHTLRYEDLNMIHSHIVSQSVQFTKVALKLEEYFIAKKSITLQIARQISYSEIADLSNYFTDEVRNTAFHFDVPETAYSMILQGIESEFLDREIKPQKPKSLSELSTQQVSVCTAFLETLHNNLFDRKDDKKERLSKARERYFEQIN

SEQ ID NO: 155 - protein, 1115 aa, Fusobacterium necrophorum subsp. funduliforme
MEKFRRQNRNSIIKIIISNYDTKGIKELKVRYRKQAQLDTFIIKTEIVNNDIFIKSIIEKAREKYRYSFLFDGEEKYHFKNKSSVEIVKKDIFSQTPDNMIRNYKITLKISEKNPRVVEAEIEDLMNSTILKDGRRSARREKSMTERKLIEEKVAKNYSLLANCPMEEVDSIKIYKIKRFLTYRSNMLLYFASINSFLCEGIKGKDNETEEIWHLKDNDVRKEKVRENFKNKLIQSTENYNSSLKNQIEEKEKLLRKEFKKGAFYRTIIKKLQQERIKELSEKSLTEDCEKIIKLYSKLRHSLMHYDYQYFENLFENKKNDDLMKDLNLDLFKSLPLIRKMKLNNKVNYLEDGDTLFVLQKTKKAKTLYQIYDALCEQKNGFNKFINDFFVSDGEENTVFKQIINEKFQSEMEFLEKRISESEKKNEKLKKKLDSMKAHFRNINSEDTKEAYFWDIHSSRNYKTKYNERKNLVNEYTELLGSSKEKKLLREEITKINRQLLKLKQEMEEITKKNSLFRLEYKMKIAFGFLFCEFDGNISKFKDEFDASNQEKIIQYHKNGEKYLTSFLKEEEKEKFNLEKMQKIIQKTEEEDWLLPETKNNLFKFYLLTYLLLPYELKGDFLGFVKKHYYDIKNVDFIDENQNNIQVSQTVEKQEDYFYHKIRLFEKNTKKYEIVKYSIVPNEKLKQYFEDLGIDIKYLTVEQKSEVSEEKNKKVSLKNNGMFNKTILLFVFKYYQIAFKLFNDIELYSLFFLREKSGKPLEIFRKELESKMKDGYLNFGQLLYVVYEVLVKNKDLDKILSKKIDYRKDKSFSPEIAYLRNFLSHLNYSKFLDNFMKINTNKSDENKEVLIPSIKIQKMIQFIEKCNLQNQIDFDFNFVNDFYMRKEKMFFIQLKQIFPDINSTEKQKMNEKEEILRNRYHLTDKKNEQIKDEHEAQSQLYEKILSLQKIYSSDKNNFYGRLKEEKLLFLEKQGKKKLSMEEIKDKIAGDISDLLGILKKEITRDIKDKLTEKFRYCEEKLLNLSFYNHQDKKKEESIRVFLIRDKNSDNFKFESILDDGSNKIFISKNGKEITIQCCDKVLETLIIEKNTLKISSNGKIISLIPHYSYSIDVKY

SEQ ID NO: 156 - protein, 1111 aa, Fusobacterium necrophorum
MEKFRRQNRSSIIKIIISNYDTKGIKELKVRYRKQAQLDTFIIKTEIVNNDIFIKSIIEKAREKYRYSFLFDGEEKYHFKNKSSVEIVKKDIFSQTPDNMIRNYKITLKISEKNPRVVEAEIEDLMNSTILKDGRRSARREKSMTERKLIEEKVAENYSLLANCPMEEVDSIKIYKIKRFLTYRSNMLLYFASINSFLCEGIKGKDNETEEIWHLKDNDVRKEKVKENFKNKLIQSTENYNSSLKNQIEEKEKLLRKESKKGAFYRTIIKKLQQERIKELSEKSLTEDCEKIIKLYSELRHPLMHYDYQYFENLFENKENSELTKNLNLDIFKSLPLVRKMKLNNKVNYLEDNDTLFVLQKTKKAKTLYQIYDALCEQKNGFNKFINDFFVSDGEENTVFKQIINEKFQSEIEFLEKRISESEKKNEKLKKKLDSMKAHFRNINSEDTKEAYFWDIHSSRNYKTKYNERKNLVNEYTELLGSSKEKKLLREEITKINRQLLKLKQEMEEITKKNSLFRLEYKMKMAFGFLFCEFDGNISRFKDEFDASNQEKIIQYHKNGEKYLTYFLKEEEKEKFNLKKLQETIQKTGEENWLLPQNKNNLFKFYLLTYLLLPYELKGDFLGFVKKHYYDIKNVDFMDENQSSKIIESKEDDFYHKIRLFEKNTKKYEIVKYSIVPDKKLKQYFKDLGIDTKYLILDQKSEVSGEKNKKVSLKNNGMFNKTILLFVFKYYQIAFKLFNDIELYSLFFLREKSGKPFEVFLKELKDKMIGKQLNFGQLLYVVYEVLVKNKDLSEILSERIDYRKDMCFSAEIADLRNFLSHLNYSKFLDNFMKINTNKSDENKEVLIPSIKIQKMIKFIEECNLQSQIDFDFNFVNDFYMRKEKMFFIQLKQIFPDINSTEKQKMNEKEEILRNRYHLTDKKNEQIKDEHEAQSQLYEKILSLQKIYSSDKNNFYGRLKEEKLLFLEKQEKKKLSMEEIKDKIAGDISDLLGILKKEITRDIKDKLTEKFRYCEEKLLNLSFYNHQDKKKEESIRVFLIRDKNSDNFKFESILDDGSNKIFISKNGKEITIQCCDKVLETLIIEKNTLKISSNGKIISLIPHYSYSIDVKY

SEQ ID NO: 157 - protein, 1110 aa, Fusobacterium necrophorum
MKVRYRKQAQLDTFIIKTEIVNNDIFIKSIIEKAREKYRYSFLFDGEEKYHFKNKSSVEIVKNDIFSQTPDNMIRNYKITLKISEKNPRVVEAEIEDLMNSTILKDGRRSARREKSMTERKLIEEKVAENYSLLANCPIEEVDSIKIYKIKRFLTYRSNMLLYFASINSFLCEGIKGKDNETEEIWHLKDNDVRKEKVKENFKNKLIQSTENYNSSLKNQIEEKEKLSSKEFKKGAFYRTIIKKLQQERIKELSEKSLTEDCEKIIKLYSELRHPLMHYDYQYFENLFENKENSELTKNLNLDIFKSLPLVRKMKLNNKVNYLEDNDTLFVLQKTKKAKTLYQIYDALCEQKNGFNKFINDFFVSDGEENTVFKQIINEKFQSEMEFLEKRISESEKKNEKLKKKLDSMKAHFRNINSEDTKEAYFWDIHSSRNYKTKYNERKNLVNEYTKLLGSSKEKKLLREEITKINRQLLKLKQEMEEITKKNSLFRLEYKMKIAFGFLFCEFDGNISKFKDEFDASNQEKIIQYHKNGEKYLTSFLKEEEKEKFNLEKMQKIIQKTEEEDWLLPETKNNLFKFYLLTYLLLPYELKGDFLGFVKKHYYDIKNVDFMDENQNNIQVSQTVEKQEDYFYHKIRLFEKNTKKYEIVKYSIVPNEKLKQYFEDLGIDIKYLTGSVESGEKWLGENLGIDIKYLTVEQKSEVSEEKNKKVSLKNNGMFNKTILLFVFKYYQIAFKLFNDIELYSLFFLREKSEKPFEVFLEELKDKMIGKQLNFGQLLYVVYEVLVKNKDLDKILSKKIDYRKDKSFSPEIAYLRNFLSHLNYSKFLDNFMKINTNKSDENKEVLIPSIKIQKMIQFIEKCNLQNQIDFDFNFVNDFYMRKEKMFFIQLKQIFPDINSTEKQKKSEKEEILRKRYHLINKKNEQIKDEHEAQSQLYEKILSLQKIFSCDKNNFYRRLKEEKLLFLEKQGKKKISMKEIKDKIASDISDLLGILKKEITRDIKDKLTEKFRYCEEKLLNISFYNHQDKKKEEGIRVFLIRDKNSDNFKFESILDDGSNKIFISKNGKEITIQCCDKVLETLMIEKNTLKISSNGKIISLIPHYSYSIDVKY

SEQ ID NO: 158 - protein, 668 aa, Fusobacterium necorphorum subsp. funduliforme
MTEKKSIIFKNKSSVEIVKKDIFSQTPDNMIRNYKITLKISEKNPRVVEAEIEDLMNSTILKDGRRSARREKSMTERKLIEEKVAENYSLLANCPMEEVDSIKIYKIKRFLTYRSNMLLYFASINSFLCEGIKGKDNETEEIWHLKDNDVRKEKVKENFKNKLIQSTENYNSSLKNQIEEKEKLLRKESKKGAFYRTIIKKLQQERIKELSEKSLTEDCEKIIKLYSELRHPLMHYDYQYFENLFENKENSELTKNLNLDIFKSLPLVRKMKLNNKVNYLEDNDTLFVLQKTKKAKTLYQIYDALCEQKNGFNKFINDFFVSDGEENTVFKQIINEKFQSEMEFLEKRISESEKKNEKLKKKFDSMKAHFHNINSEDTKEAYFWDIHSSSNYKTKYNERKNLVNEYTELLGSSKEKKLLREEITQINRKLLKLKQEMEEITKKNSLFRLEYKMKIAFGFLFCEFDGNISKFKDEFDASNQEKIIQYHKNGEKYLTYFLKEEEKEKFNLEKMQKIIQKTEEEDWLLPETKNNLFKFYLLTYLLLPYELKGDFLGFVKKHYYDIKNVDFMDENQNNIQVSQTVEKQEDYFYHKIRLFEKNTKKYEIVKYSIVPNEKLKQYFEDLGIDIKYLTGSVESGEKWLGENLGIDIKYLTVEQKSEVSEEKIKKFL

SEQ ID NO: 159 - protein, 1121 aa, Fusobacterium perfoetens
MGKPNRSSIIKIIISNYDNKGIKEVKVRYNKQAQLDTFLIKSELKDGKFILYSIVDKAREKYRYSFEIDKTNINKNEILIIKKDIYSNKEDKVIRKYILSFEVSEKNDRTIVTKIKDCLETQKKEKFERENTRRLISETERKLLSEETQKTYSKIACCSPEDIDSVKIYKIKRYLAYRSNMLLFFSLINDIFVKGVVKDNGEEVGEIWRIIDSKEIDEKKTYDLLVENFKKRMSQEFINYKQSIENKIEKNTNKIKEIEQKLKKEKYKKEINRLKKQLIELNRENDLLEKDKIELSDEEIREDIEKILKIYSDLRHKLMHYNYQYFENLFENKKISKEKNEDVNLTELLDLNLFRYLPLVRQLKLENKTNYLEKEDKITVLGVSDSAIKYYSYYNFLCEQKNGFNNFINSFFSNDGEENKSFKEKINLSLEKEIEIMEKETNEKIKEINKNELQLMKEQKELGTAYVLDIHSLNDYKISHNERNKNVKLQNDIMNGNRDKNALDKINKKLVELKIKMDKITKRNSILRLKYKLQVAYGFLMEEYKGNIKKFKDEFDISKEKIKSYKSKGEKYLEVKSEKKYITKILNSIEDIHNITWLKNQEENNLFKFYVLTYILLPFEFRGDFLGFVKKHYYDIKNVEFLDENNDRLTPEQLEKMKNDSFFNKIRLFEKNSKKYDILKESILTSERIGKYFSLLNTGAKYFEYGGEENRGIFNKNIIIPIFKYYQIVLKLYNDVELAMLLTLSESDEKDINKIKELVTLKEKVSPKKIDYEKKYKFSVLLDCFNRIINLGKKDFLASEEVKEVAKTFTNLAYLRNKICHLNYSKFIDDLLTIDTNKSTTDSEGKLLINDRIRKLIKFIRENNQKMNISIDYNYINDYYMKKEKFIFGQRKQAKTIIDSGKKANKRNKAEELLKMYRVKKENINLIYELSKKLNELTKSELFLLDKKLLKDIDFTDVKIKNKSFFELKNDVKEVANIKQALQKHSSELIGIYKKEVIMAIKRSIVSKLIYDEEKVLSIIIYDKTNKKYEDFLLEIRRERDINKFQFLIDEKKEKLGYEKIIETKEKKKVVVKIQNNSELVSEPRIIKNKDKKKAKTPEEISKLGILDLTNHYCFNLKITL

SEQ ID NO: 160 - protein, 897 aa, Fusobacterium ulcerans
MENKGNNKKIDFDENYNILVAQIKEYFTKEIENYNNRIDNIIDKKELLKYSEKKEESEKNKKLEELNKLKSQKLKILTDEEIKADVIKIIKIFSDLRHSLMHYEYKYFENLFENKKNEELAELLNLNLFKNLTLLRQMKIENKTNYLEGREEFNIIGKNIKAKEVLGHYNLLAEQKNGFNNFINSFFVQDGTENLEFKKLIDEHFVNAKKRLERNIKKSKKLEKELEKMEQHYQRLNCAYVWDIHTSTTYKKLYNKRKSLIEEYNKQINEIKDKEVITAINVELLRIKKEMEEITKSNSLFRLKYKMQIAYAFLEIEFGGNIAKFKDEFDCSKMEEVQKYLKKGVKYLKYYKDKEAQKNYEFPFEEIFENKDTHNEEWLENTSENNLFKFYILTYLLLPMEFKGDFLGVVKKHYYDIKNVDFTDESEKELSQVQLDKMIGDSFFHKIRLFEKNTKRYEIIKYSILTSDEIKRYFRLLELDVPYFEYEKGTDEIGIFNKNIILTIFKYYQIIFRLYNDLEIHGLFNISSDLDKILRDLKSYGNKNINFREFLYVIKQNNNSSTEEEYRKIWENLEAKYLRLHLLTPEKEEIKTKTKEELEKLNEISNLRNGICHLNYKEIIEEILKTEISEKNKEATLNEKIRKVINFIKENELDKVELGFNFINDFFMKKEQFMFGQIKQVKEGNSDSITTERERKEKNNKKLKETYELNCDNLSEFYETSNNLRERANSSSLLEDSAFLKKIGLYKVKNNKVNSKVKDEEKRIENIKRKLLKDSSDIMGMYKAEVVKKLKEKLILIFKHDEEKRIYVTVYDTSKAVPENISKEILVKRNNSKEEYFFEDNNKKYVTEYYTLEITETNELKVIPAKKLEGKEFKTEKNKENKLMLNNHYCFNVKIIY

SEQ ID NO: 161 - protein, 1111 aa, Anaerosalibacter sp.
MKSGRREKAKSNKSSIVRVIISNFDDKQVKEIKVLYTKQGGIDVIKFKSTEKDEKGRMKFNFDCAYNRLEEEEFNSFGGKGKQSFFVTTNEDLTELHVTKRHKTTGEIIKDYTIQGKYTPIKQDRTKVTVSITDNKDHFDSNDLGDKIRLSRSLTQYTNRILLDADVMKNYREIVCSDSEKVDETINIDSQEIYKINRFLSYRSNMIIYYQMINNFLLHYDGEEDKGGNDSINLINEIWKYENKKNDEKEKIIERSYKSIEKSINQYILNHNTEVESGDKEKKIDISEERIKEDLKKTFILFSRLRHYMVHYNYKFYENLYSGKNFIIYNKDKSKSRRFSELLDLNIFKELSKIKLVKNRAVSNYLDKKTTIHVLNKNINAIKLLDIYRDICETKNGFNNFINNMMTISGEEDKEYKEMVTKHFNENMNKLSIYLENFKKHSDFKTNNKKKETYNLLKQELDEQKKLRLWFNAPYVYDIHSSKKYKELYVERKKYVDIHSKLIEAGINNDNKKKLNEINVKLCELNTEMKEMTKLNSKYRLQYKLQLAFGFILEEFNLDIDKFVSAFDKDNNLTISKFMEKRETYLSKSLDRRDNRFKKLIKDYKFRDTEDIFCSDRENNLVKLYILMYILLPVEIRGDFLGFVKKNYYDLKHVDFIDKRNNDNKDTFFHDLRLFEKNVKRLEVTSYSLSDGFLGKKSREKFGKELEKFIYKNVSIALPTNIDIKEFNKSLVLPMMKNYQIIFKLLNDIEISALFLIAKKEGNEGSITFKKVIDKVRKEDMNGNINFSQVMKMALNEKVNCQIRNSIAHINMKQLYIEPLNIYINNNQNKKTISEQMEEIIDICITKGLTGKELNKNIINDYYMKKEKLVFNLKLRKRNNLVSIDAQQKNMKEKSILNKYDLNYKDENLNIKEIILKVNDLNNKQKLLKETTEGESNYKNALSKDILLLNGIIRKNINFKIKEMILGIIQQNEYRYVNINIYDKIRKEDHNIDLKINNKYIEISCYENKSNESTDERINFKIKYMDLKVKNELLVPSCYEDIYIKKKIDLEIRYIENCKVVYIDIYYKKYNINLEFDGKTLFVKFNKDVKKNNQKVNLESNYIQNIKFIVS

SEQ ID NO: 162 - DNA, 45 bp, Artificial Sequence
  Synthetic
catagaatgttctaaaccatcctgcggcctctactctgcattcaa

SEQ ID NO: 163 - DNA, 45 bp, Artificial Sequence
  Synthetic
catagaatgttcgaaaccatcctgcggcctctactctgcattcaa

SEQ ID NO: 164 - DNA, 45 bp, Artificial Sequence
  Synthetic
catagaatggtcgaaaccatcctgcggcctctactctgcattcaa

SEQ ID NO: 165 - DNA, 45 bp, Artificial Sequence
  Synthetic
catagaatgttcaaaaccatcctgcggcctctactctgcattcaa

SEQ ID NO: 166 - DNA, 45 bp, Artificial Sequence
  Synthetic
catagaatgatcaaaaccatcctgcggcctctactctgcattcaa

SEQ ID NO: 167 - DNA, 46 bp, Artificial Sequence
  Synthetic
ggtttctccatcaattaccacttgcttcctgtaggaatcctctatt

SEQ ID NO: 168 - DNA, 46 bp, Artificial Sequence
  Synthetic
ggtttctccatcaatgaccacttgcttcctgtaggaatcctctatt

SEQ ID NO: 169 - DNA, 46 bp, Artificial Sequence
  Synthetic
ggtttctccatcaaggaccacttgcttcctgtaggaatcctctatt

SEQ ID NO: 170 - DNA, 46 bp, Artificial Sequence
  Synthetic
ggtttctccatcaataaccacttgcttcctgtaggaatcctctatt

SEQ ID NO: 171 - DNA, 46 bp, Artificial Sequence
  Synthetic
ggtttctccatcaaaaaccacttgcttcctgtaggaatcctctatt

SEQ ID NO: 172 - DNA, 46 bp, Artificial Sequence
  Synthetic
gcctttctctcctgtagccaaggccacaaaattatccactgttttt

SEQ ID NO: 173 - DNA, 46 bp, Artificial Sequence
  Synthetic
gcctttctctcctggagccaaggccacaaaattatccactgttttt

SEQ ID NO: 174 - DNA, 46 bp, Artificial Sequence
  Synthetic
gcctttctctcctgaagccaaggccacaaaattatccactgttttt

SEQ ID NO: 175 - DNA, 46 bp, Artificial Sequence
  Synthetic
gcatagaatgttctaaaccatcctgcggcctctactctgcattcaa

SEQ ID NO: 176 - DNA, 46 bp, Artificial Sequence
  Synthetic
gcatagaatgttctaaacgatcctgcggcctctactctgcattcaa

SEQ ID NO: 177 - DNA, 46 bp, Artificial Sequence
  Synthetic
gcatagaatgttctaaactatcctgcggcctctactctgcattcaa

SEQ ID NO: 178 - DNA, 46 bp, Artificial Sequence
  Synthetic
gcatagaatgttctaaacaatcctgcggcctctactctgcattcaa

SEQ ID NO: 179 - DNA, 31 bp, Artificial Sequence
  Synthetic
gcatcctgcggcctctactctgcattcaatt

SEQ ID NO: 180 - DNA, 31 bp, Artificial Sequence
  Synthetic
gaccatcctgcggcctctactctgcattcaa

SEQ ID NO: 181 - DNA, 31 bp, Artificial Sequence
  Synthetic
gaaaccatcctgcggcctctactctgcattc

SEQ ID NO: 182 - DNA, 31 bp, Artificial Sequence
  Synthetic
gctaaaccatcctgcggcctctactctgcat

SEQ ID NO: 183 - DNA, 31 bp, Artificial Sequence
  Synthetic
gttctaaaccatcctgcggcctctactctgc

SEQ ID NO: 184 - DNA, 31 bp, Artificial Sequence
  Synthetic
gtgttctaaaccatcctgcggcctctactct

SEQ ID NO: 185 - DNA, 31 bp, Artificial Sequence
  Synthetic
gaatgttctaaaccatcctgcggcctctact

SEQ ID NO: 186 - DNA, 31 bp, Artificial Sequence
  Synthetic
gagaatgttctaaaccatcctgcggcctcta

SEQ ID NO: 187 - DNA, 31 bp, Artificial Sequence
  Synthetic
gatagaatgttctaaaccatcctgcggcctc

SEQ ID NO: 188 - DNA, 31 bp, Artificial Sequence
  Synthetic
gccatagaatgttctaaaccatcctgcggcc

SEQ ID NO: 189 - DNA, 31 bp, Artificial Sequence
  Synthetic
gttccatagaatgttctaaaccatcctgcgg

SEQ ID NO: 190 - DNA, 31 bp, Artificial Sequence
  Synthetic
gctttccatagaatgttctaaaccatcctgc

SEQ ID NO: 191 - DNA, 31 bp, Artificial Sequence
  Synthetic
gctctttccatagaatgttctaaaccatcct

SEQ ID NO: 192 - DNA, 31 bp, Artificial Sequence
  Synthetic
gatctctttccatagaatgttctaaaccatc

SEQ ID NO: 193 - DNA, 31 bp, Artificial Sequence
  Synthetic
ggaatctctttccatagaatgttctaaacca

SEQ ID NO: 194 - DNA, 51 bp, Artificial Sequence
  Synthetic
gcatcctgcggcctctactctgcattcaattacatactgacacattcggca

SEQ ID NO: 195 - DNA, 51 bp, Artificial Sequence
  Synthetic
gaccatcctgcggcctctactctgcattcaattacatactgacacattcgg

SEQ ID NO: 196 - DNA, 51 bp, Artificial Sequence
  Synthetic
gaaaccatcctgcggcctctactctgcattcaattacatactgacacattc

SEQ ID NO: 197 - DNA, 51 bp, Artificial Sequence
  Synthetic
gctaaaccatcctgcggcctctactctgcattcaattacatactgacacat

SEQ ID NO: 198 - DNA, 51 bp, Artificial Sequence
  Synthetic
gttctaaaccatcctgcggcctctactctgcattcaattacatactgacac

SEQ ID NO: 199 - DNA, 51 bp, Artificial Sequence
  Synthetic
gtgttctaaaccatcctgcggcctctactctgcattcaattacatactgac

SEQ ID NO: 200 - DNA, 51 bp, Artificial Sequence
  Synthetic
gaatgttctaaaccatcctgcggcctctactctgcattcaattacatactg

SEQ ID NO: 201 - DNA, 51 bp, Artificial Sequence
  Synthetic
gagaatgttctaaaccatcctgcggcctctactctgcattcaattacatac

SEQ ID NO: 202 - DNA, 51 bp, Artificial Sequence
  Synthetic
gatagaatgttctaaaccatcctgcggcctctactctgcattcaattacat

SEQ ID NO: 203 - DNA, 51 bp, Artificial Sequence
  Synthetic
gccatagaatgttctaaaccatcctgcggcctctactctgcattcaattac

SEQ ID NO: 204 - DNA, 51 bp, Artificial Sequence
  Synthetic
gttccatagaatgttctaaaccatcctgcggcctctactctgcattcaatt

SEQ ID NO: 205 - DNA, 51 bp, Artificial Sequence
  Synthetic
gctttccatagaatgttctaaaccatcctgcggcctctactctgcattcaa

SEQ ID NO: 206 - DNA, 51 bp, Artificial Sequence
  Synthetic
gctctttccatagaatgttctaaaccatcctgcggcctctactctgcattc

SEQ ID NO: 207 - DNA, 51 bp, Artificial Sequence
  Synthetic
gatctctttccatagaatgttctaaaccatcctgcggcctctactctgcat

SEQ ID NO: 208 - DNA, 51 bp, Artificial Sequence
  Synthetic
ggaatctctttccatagaatgttctaaaccatcctgcggcctctactctgc

SEQ ID NO: 209 - DNA, 51 bp, Artificial Sequence
  Synthetic
gtggaatctctttccatagaatgttctaaaccatcctgcggcctctactct

SEQ ID NO: 210 - DNA, 51 bp, Artificial Sequence
  Synthetic
gactggaatctctttccatagaatgttctaaaccatcctgcggcctctact

SEQ ID NO: 211 - DNA, 51 bp, Artificial Sequence
  Synthetic
ggaactggaatctctttccatagaatgttctaaaccatcctgcggcctcta

SEQ ID NO: 212 - DNA, 51 bp, Artificial Sequence
  Synthetic
gtggaactggaatctctttccatagaatgttctaaaccatcctgcggcctc

SEQ ID NO: 213 - DNA, 51 bp, Artificial Sequence
  Synthetic
gcctggaactggaatctctttccatagaatgttctaaaccatcctgcggcc

SEQ ID NO: 214 - DNA, 51 bp, Artificial Sequence
  Synthetic
gttcctggaactggaatctctttccatagaatgttctaaaccatcctgcgg

SEQ ID NO: 215 - DNA, 51 bp, Artificial Sequence
  Synthetic
gggttcctggaactggaatctctttccatagaatgttctaaaccatcctgc

SEQ ID NO: 216 - DNA, 51 bp, Artificial Sequence
  Synthetic
gcaggttcctggaactggaatctctttccatagaatgttctaaaccatcct

SEQ ID NO: 217 - DNA, 51 bp, Artificial Sequence
  Synthetic
gaccaggttcctggaactggaatctctttccatagaatgttctaaaccatc

SEQ ID NO: 218 - DNA, 51 bp, Artificial Sequence
  Synthetic
ggtaccaggttcctggaactggaatctctttccatagaatgttctaaacca

SEQ ID NO: 219 - DNA, 71 bp, Artificial Sequence
  Synthetic
gcatcctgcggcctctactctgcattcaattacatactgacacattcggcaacatgtttttcctggtttat

SEQ ID NO: 220 - DNA, 71 bp, Artificial Sequence
  Synthetic
gaccatcctgcggcctctactctgcattcaattacatactgacacattcggcaacatgtttttcctggttt

SEQ ID NO: 221 - DNA, 71 bp, Artificial Sequence
  Synthetic
gaaaccatcctgcggcctctactctgcattcaattacatactgacacattcggcaacatgtttttcctggt

SEQ ID NO: 222 - DNA, 71 bp, Artificial Sequence
  Synthetic
gctaaaccatcctgcggcctctactctgcattcaattacatactgacacattcggcaacatgtttttcctg

SEQ ID NO: 223 - DNA, 71 bp, Artificial Sequence
  Synthetic
gttctaaaccatcctgcggcctctactctgcattcaattacatactgacacattcggcaacatgtttttcc

SEQ ID NO: 224 - DNA, 71 bp, Artificial Sequence
  Synthetic
gtgttctaaaccatcctgcggcctctactctgcattcaattacatactgacacattcggcaacatgttttt

SEQ ID NO: 225 - DNA, 71 bp, Artificial Sequence
  Synthetic
gaatgttctaaaccatcctgcggcctctactctgcattcaattacatactgacacattcggcaacatgttt

SEQ ID NO: 226 - DNA, 71 bp, Artificial Sequence
  Synthetic
gagaatgttctaaaccatcctgcggcctctactctgcattcaattacatactgacacattcggcaacatgt

SEQ ID NO: 227 - DNA, 71 bp, Artificial Sequence
  Synthetic
gatagaatgttctaaaccatcctgcggcctctactctgcattcaattacatactgacacattcggcaacat

SEQ ID NO: 228 - DNA, 71 bp, Artificial Sequence
  Synthetic
gccatagaatgttctaaaccatcctgcggcctctactctgcattcaattacatactgacacattcggcaac

SEQ ID NO: 229 - DNA, 71 bp, Artificial Sequence
  Synthetic
gttccatagaatgttctaaaccatcctgcggcctctactctgcattcaattacatactgacacattcggca

SEQ ID NO: 230 - DNA, 71 bp, Artificial Sequence
  Synthetic
gctttccatagaatgttctaaaccatcctgcggcctctactctgcattcaattacatactgacacattcgg

SEQ ID NO: 231 - DNA, 71 bp, Artificial Sequence
  Synthetic
gctctttccatagaatgttctaaaccatcctgcggcctctactctgcattcaattacatactgacacattc

SEQ ID NO: 232 - DNA, 71 bp, Artificial Sequence
  Synthetic
gatctctttccatagaatgttctaaaccatcctgcggcctctactctgcattcaattacatactgacacat

SEQ ID NO: 233 - DNA, 71 bp, Artificial Sequence
  Synthetic
ggaatctctttccatagaatgttctaaaccatcctgcggcctctactctgcattcaattacatactgacac

SEQ ID NO: 234 - DNA, 71 bp, Artificial Sequence
  Synthetic
gtggaatctctttccatagaatgttctaaaccatcctgcggcctctactctgcattcaattacatactgac

SEQ ID NO: 235 - DNA, 71 bp, Artificial Sequence
  Synthetic
gactggaatctctttccatagaatgttctaaaccatcctgcggcctctactctgcattcaattacatactg

SEQ ID NO: 236 - DNA, 71 bp, Artificial Sequence
  Synthetic
ggaactggaatctctttccatagaatgttctaaaccatcctgcggcctctactctgcattcaattacatac

SEQ ID NO: 237 - DNA, 71 bp, Artificial Sequence
  Synthetic
gtggaactggaatctctttccatagaatgttctaaaccatcctgcggcctctactctgcattcaattacat

SEQ ID NO: 238 - DNA, 71 bp, Artificial Sequence
  Synthetic
gcctggaactggaatctctttccatagaatgttctaaaccatcctgcggcctctactctgcattcaattac

SEQ ID NO: 239 - DNA, 71 bp, Artificial Sequence
  Synthetic
gttcctggaactggaatctctttccatagaatgttctaaaccatcctgcggcctctactctgcattcaatt

SEQ ID NO: 240 - DNA, 71 bp, Artificial Sequence
  Synthetic
gggttcctggaactggaatctctttccatagaatgttctaaaccatcctgcggcctctactctgcattcaa

SEQ ID NO: 241 - DNA, 71 bp, Artificial Sequence
  Synthetic
gcaggttcctggaactggaatctctttccatagaatgttctaaaccatcctgcggcctctactctgcattc

SEQ ID NO: 242 - DNA, 71 bp, Artificial Sequence
  Synthetic
gaccaggttcctggaactggaatctctttccatagaatgttctaaaccatcctgcggcctctactctgcat

SEQ ID NO: 243 - DNA, 71 bp, Artificial Sequence
  Synthetic
ggtaccaggttcctggaactggaatctctttccatagaatgttctaaaccatcctgcggcctctactctgc

SEQ ID NO: 244 - DNA, 71 bp, Artificial Sequence
  Synthetic
gatgtaccaggttcctggaactggaatctctttccatagaatgttctaaaccatcctgcggcctctactct

SEQ ID NO: 245 - DNA, 71 bp, Artificial Sequence
  Synthetic
ggtatgtaccaggttcctggaactggaatctctttccatagaatgttctaaaccatcctgcggcctctact

SEQ ID NO: 246 - DNA, 71 bp, Artificial Sequence
  Synthetic
gacgtatgtaccaggttcctggaactggaatctctttccatagaatgttctaaaccatcctgcggcctcta

SEQ ID NO: 247 - DNA, 71 bp, Artificial Sequence
  Synthetic
gacacgtatgtaccaggttcctggaactggaatctctttccatagaatgttctaaaccatcctgcggcctc

SEQ ID NO: 248 - DNA, 71 bp, Artificial Sequence
  Synthetic
gcaacacgtatgtaccaggttcctggaactggaatctctttccatagaatgttctaaaccatcctgcggcc

SEQ ID NO: 249 - DNA, 71 bp, Artificial Sequence
  Synthetic
gcccaacacgtatgtaccaggttcctggaactggaatctctttccatagaatgttctaaaccatcctgcgg

SEQ ID NO: 250 - DNA, 71 bp, Artificial Sequence
  Synthetic
ggacccaacacgtatgtaccaggttcctggaactggaatctctttccatagaatgttctaaaccatcctgc

SEQ ID NO: 251 - DNA, 71 bp, Artificial Sequence
  Synthetic
gttgacccaacacgtatgtaccaggttcctggaactggaatctctttccatagaatgttctaaaccatcct

SEQ ID NO: 252 - DNA, 71 bp, Artificial Sequence
  Synthetic
gccttgacccaacacgtatgtaccaggttcctggaactggaatctctttccatagaatgttctaaaccatc

SEQ ID NO: 253 - DNA, 71 bp, Artificial Sequence
  Synthetic
gttccttgacccaacacgtatgtaccaggttcctggaactggaatctctttccatagaatgttctaaacca

SEQ ID NO: 254 - DNA, 85 bp, Artificial Sequence
  Synthetic
gcatcctgcggcctctactctgcattcaattacatactgacacattcggcaacatgtttttcctggtttattttcacacagtcca

SEQ ID NO: 255 - DNA, 85 bp, Artificial Sequence
  Synthetic
gaccatcctgcggcctctactctgcattcaattacatactgacacattcggcaacatgtttttcctggtttattttcacacagtc

SEQ ID NO: 256 - DNA, 85 bp, Artificial Sequence
  Synthetic
gaaaccatcctgcggcctctactctgcattcaattacatactgacacattcggcaacatgtttttcctggtttattttcacacag

SEQ ID NO: 257 - DNA, 85 bp, Artificial Sequence
  Synthetic
gctaaaccatcctgcggcctctactctgcattcaattacatactgacacattcggcaacatgtttttcctggtttattttcacac

SEQ ID NO: 258 - DNA, 85 bp, Artificial Sequence
  Synthetic
gttctaaaccatcctgcggcctctactctgcattcaattacatactgacacattcggcaacatgtttttcctggtttattttcac

SEQ ID NO: 259 - DNA, 85 bp, Artificial Sequence
  Synthetic
gtgttctaaaccatcctgcggcctctactctgcattcaattacatactgacacattcggcaacatgtttttcctggtttattttc

SEQ ID NO: 260 - DNA, 85 bp, Artificial Sequence
  Synthetic
gaatgttctaaaccatcctgcggcctctactctgcattcaattacatactgacacattcggcaacatgtttttcctggtttattt

SEQ ID NO: 261 - DNA, 85 bp, Artificial Sequence
  Synthetic
gagaatgttctaaaccatcctgcggcctctactctgcattcaattacatactgacacattcggcaacatgtttttcctggtttat

SEQ ID NO: 262 - DNA, 85 bp, Artificial Sequence
  Synthetic
gatagaatgttctaaaccatcctgcggcctctactctgcattcaattacatactgacacattcggcaacatgtttttcctggttt

SEQ ID NO: 263 - DNA, 85 bp, Artificial Sequence
  Synthetic
gccatagaatgttctaaaccatcctgcggcctctactctgcattcaattacatactgacacattcggcaacatgtttttcctggt

SEQ ID NO: 264 - DNA, 85 bp, Artificial Sequence
  Synthetic
gttccatagaatgttctaaaccatcctgcggcctctactctgcattcaattacatactgacacattcggcaacatgtttttcctg

SEQ ID NO: 265 - DNA, 85 bp, Artificial Sequence
  Synthetic
gctttccatagaatgttctaaaccatcctgcggcctctactctgcattcaattacatactgacacattcggcaacatgtttttcc

SEQ ID NO: 266 - DNA, 85 bp, Artificial Sequence
  Synthetic
gctctttccatagaatgttctaaaccatcctgcggcctctactctgcattcaattacatactgacacattcggcaacatgttttt

SEQ ID NO: 267 - DNA, 85 bp, Artificial Sequence
  Synthetic
gatctctttccatagaatgttctaaaccatcctgcggcctctactctgcattcaattacatactgacacattcggcaacatgttt

SEQ ID NO: 268 - DNA, 85 bp, Artificial Sequence
  Synthetic
ggaatctctttccatagaatgttctaaaccatcctgcggcctctactctgcattcaattacatactgacacattcggcaacatgt

SEQ ID NO: 269 - DNA, 85 bp, Artificial Sequence
  Synthetic
gtggaatctctttccatagaatgttctaaaccatcctgcggcctctactctgcattcaattacatactgacacattcggcaacat

SEQ ID NO: 270 - DNA, 85 bp, Artificial Sequence
  Synthetic
gactggaatctctttccatagaatgttctaaaccatcctgcggcctctactctgcattcaattacatactgacacattcggcaac

SEQ ID NO: 271 - DNA, 85 bp, Artificial Sequence
  Synthetic
ggaactggaatctctttccatagaatgttctaaaccatcctgcggcctctactctgcattcaattacatactgacacattcggca

SEQ ID NO: 272 - DNA, 85 bp, Artificial Sequence
  Synthetic
gtggaactggaatctctttccatagaatgttctaaaccatcctgcggcctctactctgcattcaattacatactgacacattcgg

SEQ ID NO: 273 - DNA, 85 bp, Artificial Sequence
  Synthetic
gcctggaactggaatctctttccatagaatgttctaaaccatcctgcggcctctactctgcattcaattacatactgacacattc

SEQ ID NO: 274 - DNA, 85 bp, Artificial Sequence
  Synthetic
gttcctggaactggaatctctttccatagaatgttctaaaccatcctgcggcctctactctgcattcaattacatactgacacat

SEQ ID NO: 275 - DNA, 85 bp, Artificial Sequence
  Synthetic
gggttcctggaactggaatctctttccatagaatgttctaaaccatcctgcggcctctactctgcattcaattacatactgacac

SEQ ID NO: 276 - DNA, 85 bp, Artificial Sequence
  Synthetic
gcaggttcctggaactggaatctctttccatagaatgttctaaaccatcctgcggcctctactctgcattcaattacatactgac

SEQ ID NO: 277 - DNA, 85 bp, Artificial Sequence
  Synthetic
gaccaggttcctggaactggaatctctttccatagaatgttctaaaccatcctgcggcctctactctgcattcaattacatactg

SEQ ID NO: 278 - DNA, 85 bp, Artificial Sequence
  Synthetic
ggtaccaggttcctggaactggaatctctttccatagaatgttctaaaccatcctgcggcctctactctgcattcaattacatac

SEQ ID NO: 279 - DNA, 85 bp, Artificial Sequence
  Synthetic
gatgtaccaggttcctggaactggaatctctttccatagaatgttctaaaccatcctgcggcctctactctgcattcaattacat

SEQ ID NO: 280 - DNA, 85 bp, Artificial Sequence
  Synthetic
ggtatgtaccaggttcctggaactggaatctctttccatagaatgttctaaaccatcctgcggcctctactctgcattcaattac

SEQ ID NO: 281 - DNA, 85 bp, Artificial Sequence
  Synthetic
gacgtatgtaccaggttcctggaactggaatctctttccatagaatgttctaaaccatcctgcggcctctactctgcattcaatt

SEQ ID NO: 282 - DNA, 85 bp, Artificial Sequence
  Synthetic
gacacgtatgtaccaggttcctggaactggaatctctttccatagaatgttctaaaccatcctgcggcctctactctgcattcaa

SEQ ID NO: 283 - DNA, 85 bp, Artificial Sequence
  Synthetic
gcaacacgtatgtaccaggttcctggaactggaatctctttccatagaatgttctaaaccatcctgcggcctctactctgcattc

SEQ ID NO: 284 - DNA, 85 bp, Artificial Sequence
  Synthetic
gcccaacacgtatgtaccaggttcctggaactggaatctctttccatagaatgttctaaaccatcctgcggcctctactctgcat

SEQ ID NO: 285 - DNA, 85 bp, Artificial Sequence
  Synthetic
ggacccaacacgtatgtaccaggttcctggaactggaatctctttccatagaatgttctaaaccatcctgcggcctctactctgc

SEQ ID NO: 286 - DNA, 85 bp, Artificial Sequence
  Synthetic
gttgacccaacacgtatgtaccaggttcctggaactggaatctctttccatagaatgttctaaaccatcctgcggcctctactct

SEQ ID NO: 287 - DNA, 85 bp, Artificial Sequence
  Synthetic
gccttgacccaacacgtatgtaccaggttcctggaactggaatctctttccatagaatgttctaaaccatcctgcggcctctact

SEQ ID NO: 288 - DNA, 85 bp, Artificial Sequence
  Synthetic
gttccttgacccaacacgtatgtaccaggttcctggaactggaatctctttccatagaatgttctaaaccatcctgcggcctcta

SEQ ID NO: 289 - DNA, 85 bp, Artificial Sequence
  Synthetic
gggttccttgacccaacacgtatgtaccaggttcctggaactggaatctctttccatagaatgttctaaaccatcctgcggcctc

SEQ ID NO: 290 - DNA, 85 bp, Artificial Sequence
  Synthetic
gttggttccttgacccaacacgtatgtaccaggttcctggaactggaatctctttccatagaatgttctaaaccatcctgcggcc

SEQ ID NO: 291 - DNA, 85 bp, Artificial Sequence
  Synthetic
gccttggttccttgacccaacacgtatgtaccaggttcctggaactggaatctctttccatagaatgttctaaaccatcctgcgg

SEQ ID NO: 292 - DNA, 85 bp, Artificial Sequence
  Synthetic
ggcccttggttccttgacccaacacgtatgtaccaggttcctggaactggaatctctttccatagaatgttctaaaccatcctgc

SEQ ID NO: 293 - DNA, 85 bp, Artificial Sequence
  Synthetic
gccgcccttggttccttgacccaacacgtatgtaccaggttcctggaactggaatctctttccatagaatgttctaaaccatcct

SEQ ID NO: 294 - DNA, 85 bp, Artificial Sequence
  Synthetic
gcgccgcccttggttccttgacccaacacgtatgtaccaggttcctggaactggaatctctttccatagaatgttctaaaccatc

SEQ ID NO: 295 - DNA, 85 bp, Artificial Sequence
  Synthetic
ggtcgccgcccttggttccttgacccaacacgtatgtaccaggttcctggaactggaatctctttccatagaatgttctaaacca

SEQ ID NO: 296 - protein, 7 aa, Artificial Sequence
  Synthetic
GSGGGGS

SEQ ID NO: 297 - protein, 5 aa, Artificial Sequence
  Synthetic
EAAAK

SEQ ID NO: 298 - protein, 18 aa, Artificial Sequence
  Synthetic
GGSGGSGGSGGSGGSGGS

SEQ ID NO: 299 - protein, 16 aa, Artificial Sequence
  Synthetic
SGSETPGTSESATPES

SEQ ID NO: 300 - RNA, 28 nt, Artificial Sequence
  Synthetic
gccagcuuuccgggcauuggcuuccauc

SEQ ID NO: 301 - DNA, 28 bp, Artificial Sequence
  Synthetic
gccagctttccgggcattggcttccatc

SEQ ID NO: 302 - DNA, 28 bp, Artificial Sequence
  Synthetic
acccaggaatctcaggaatgtcgacgat

SEQ ID NO: 303 - DNA, 28 bp, Artificial Sequence
  Synthetic
agggttttcccagtcacgacgttgtaaa

SEQ ID NO: 304 - DNA, 30 bp, Artificial Sequence
  Synthetic
gggcattggcttccatctctttgagcacct

SEQ ID NO: 305 - RNA, 30 nt, Artificial Sequence
  Synthetic
gugcagccagcuuuccgggcauuggcuucc

SEQ ID NO: 306 - RNA, 30 nt, Artificial Sequence
  Synthetic
gcagccagcuuuccgggcauuggcuuccau

SEQ ID NO: 307 - RNA, 30 nt, Artificial Sequence
  Synthetic
ggcuuccaucucuuugagcaccuccagcgg

SEQ ID NO: 308 - RNA, 30 nt, Artificial Sequence
  Synthetic
ggaaugucgacgaucgccucgccuaugccg

SEQ ID NO: 309 - RNA, 30 nt, Artificial Sequence
  Synthetic
gaaugucgacgaucgccucgccuaugccgc

SEQ ID NO: 310 - RNA, 30 nt, Artificial Sequence
  Synthetic
gaccugugcgaugaacugcuccaugggcuc

SEQ ID NO: 311 - RNA, 30 nt, Artificial Sequence
  Synthetic
guguggcagcguccugggaugaacuucuuc

SEQ ID NO: 312 - RNA, 30 nt, Artificial Sequence
  Synthetic
guggcagcguccugggaugaacuucuucau

SEQ ID NO: 313 - RNA, 30 nt, Artificial Sequence
  Synthetic
gcuucuugccgggcaacuucccgcggucag

SEQ ID NO: 314 - RNA, 31 nt, Artificial Sequence
  Synthetic
gcaggguuuucccagucacgacguuguaaaa

SEQ ID NO: 315 - RNA, 31 nt, Artificial Sequence; identical to SEQ ID NO: 314
  Synthetic

SEQ ID NO: 316 - RNA, 28 nt, Artificial Sequence
  Synthetic
acccaggaaucucaggaaugucgacgau

SEQ ID NO: 317 - DNA, 21 bp, Artificial Sequence
  Synthetic
cagctttccgggcattggctt

SEQ ID NO: 318 - RNA, 30 nt, Artificial Sequence
  Synthetic
ccgcuggaggugcucaaagagauggaagcc

SEQ ID NO: 319 - DNA, 28 bp, Artificial Sequence
  Synthetic
gccagctttccgggcattggcttccatc

SEQ ID NO: 320 - DNA, 28 bp, Artificial Sequence
  Synthetic
acccaggaatctcaggaatgtcgacgat

SEQ ID NO: 321 - DNA, 30 bp, Artificial Sequence; identical to SEQ ID NO: 304
  Synthetic

SEQ ID NO: 322 - RNA, 30 nt, Artificial Sequence; identical to SEQ ID NO: 309
  Synthetic

SEQ ID NO: 323 - DNA, 28 bp, Artificial Sequence
  Synthetic
caaggcactcttgcctacgccaccagct

SEQ ID NO: 324 - DNA, 28 bp, Artificial Sequence
  Synthetic
tcatattcgtccacaaaatgattctgaa

SEQ ID NO: 325 - DNA, 28 bp, Artificial Sequence
  Synthetic
attatttatggcaaatacacaaagaaag

SEQ ID NO: 326 - DNA, 28 bp, Artificial Sequence
  Synthetic
gaatatcttcaaatgatttagtattatt

SEQ ID NO: 327 - DNA, 28 bp, Artificial Sequence
  Synthetic
accataggtacatcttcagagtccttaa

SEQ ID NO: 328 - DNA, 30 bp, Artificial Sequence
  Synthetic
gtcaaggcactcttgcctacgccaccagct

SEQ ID NO: 329 - DNA, 30 bp, Artificial Sequence
  Synthetic
gatcatattcgtccacaaaatgattctgaa

SEQ ID NO: 330 - DNA, 30 bp, Artificial Sequence
  Synthetic
gtattatttatggcaaatacacaaagaaag

SEQ ID NO: 331 - DNA, 30 bp, Artificial Sequence
  Synthetic
gtgaatatcttcaaatgatttagtattatt

SEQ ID NO: 332 - DNA, 30 bp, Artificial Sequence
  Synthetic
ggaccataggtacatcttcagagtccttaa

SEQ ID NO: 333 - DNA, 50 bp, Artificial Sequence
  Synthetic
aagagtgccttgacgatacagcctcgaggctgtatcgtcaaggcactctt

SEQ ID NO: 334 - DNA, 48 bp, Artificial Sequence
  Synthetic
aatcattttgtggacgaatatctcgagatattcgtccacaaaatgatt

SEQ ID NO: 335 - DNA, 48 bp, Artificial Sequence
  Synthetic
aaataatactaaatcatttgactcgagtcaaatgatttagtattattt

SEQ ID NO: 336 - DNA, 48 bp, Artificial Sequence
  Synthetic
aataatactaaatcatttgaactcgagttcaaatgatttagtattatt

SEQ ID NO: 337 - DNA, 48 bp, Artificial Sequence
  Synthetic
aaggactctgaagatgtacctctcgagaggtacatcttcagagtcctt

SEQ ID NO: 338 - DNA, 30 bp, Artificial Sequence
  Synthetic
gagatcagggcaaacagaactttgactccc

SEQ ID NO: 339 - DNA, 30 bp, Artificial Sequence
  Synthetic
ggatgcagatcagggcaaacagaactttga

SEQ ID NO: 340 - DNA, 30 bp, Artificial Sequence
  Synthetic
gcacagcgatgcagatcagggcaaacagaa

SEQ ID NO: 341 - DNA, 30 bp, Artificial Sequence
  Synthetic
gctcggccacagcgatgcagatcagggcaa

SEQ ID NO: 342 - DNA, 30 bp, Artificial Sequence
  Synthetic
ggggcttggcctcggccacagcgatgcaga

SEQ ID NO: 343 - DNA, 30 bp, Artificial Sequence
  Synthetic
gtgggcttggcctcggccacagcgatgcag

SEQ ID NO: 344 - DNA, 30 bp, Artificial Sequence
  Synthetic
gtctcggtgggcttggcctcggccacagcg

SEQ ID NO: 345 - DNA, 30 bp, Artificial Sequence
  Synthetic
gttcgttgttctcggtgggcttggcctcgg

SEQ ID NO: 346 - DNA, 30 bp, Artificial Sequence
  Synthetic
ggaagtcttcgttgttctcggtgggcttgg

SEQ ID NO: 347 - DNA, 30 bp, Artificial Sequence
  Synthetic
gatgttgaagtcttcgttgttctcggtggg

SEQ ID NO: 348 - DNA, 30 bp, Artificial Sequence
  Synthetic
gcggccacgatgttgaagtcttcgttgttc

SEQ ID NO: 349 - DNA, 30 bp, Artificial Sequence
  Synthetic
gtggccacggccacgatgttgaagtcttcg

SEQ ID NO: 350 - DNA, 30 bp, Artificial Sequence
  Synthetic
ggttgctggccacggccacgatgttgaagt

SEQ ID NO: 351 - DNA, 30 bp, Artificial Sequence
  Synthetic
gtcgcgaagttgctggccacggccacgatg

SEQ ID NO: 352 - DNA, 30 bp, Artificial Sequence
  Synthetic
gccgtggtcgcgaagttgctggccacggcc

SEQ ID NO: 353 - DNA, 30 bp, Artificial Sequence
  Synthetic
gcgagatccgtggtcgcgaagttgctggcc

SEQ ID NO: 354 - DNA, 30 bp, Artificial Sequence
  Synthetic
gcagcatcgagatccgtggtcgcgaagttg

SEQ ID NO: 355 - DNA, 30 bp, Artificial Sequence
  Synthetic
gggtcagcatcgagatccgtggtcgcgaag

SEQ ID NO: 356 - DNA, 30 bp, Artificial Sequence
  Synthetic
gcttcccgcggtcagcatcgagatccgtgg

SEQ ID NO: 357 - DNA, 30 bp, Artificial Sequence
  Synthetic
ggggcaacttcccgcggtcagcatcgagat

SEQ ID NO: 358 - DNA, 30 bp, Artificial Sequence
  Synthetic
gtcttgccgggcaacttcccgcggtcagca

SEQ ID NO: 359 - DNA, 30 bp, Artificial Sequence
  Synthetic
ggcagcttcttgccgggcaacttcccgcgg

SEQ ID NO: 360 - DNA, 30 bp, Artificial Sequence
  Synthetic
gccagcggcagcttcttgccgggcaacttc

SEQ ID NO: 361 - DNA, 30 bp, Artificial Sequence
  Synthetic
gcacctccagcggcagcttcttgccgggca

SEQ ID NO: 362 - DNA, 30 bp, Artificial Sequence
  Synthetic
gctttgagcacctccagcggcagcttcttg

SEQ ID NO: 363 - DNA, 30 bp, Artificial Sequence
  Synthetic
gcatctctttgagcacctccagcggcagct

SEQ ID NO: 364 - DNA, 30 bp, Artificial Sequence
  Synthetic
gtccatctctttgagcacctccagcggcag

SEQ ID NO: 365 - DNA, 30 bp, Artificial Sequence; identical to SEQ ID NO: 304
  Synthetic

SEQ ID NO: 366 - DNA, 30 bp, Artificial Sequence
  Synthetic
gtccgggcattggcttccatctctttgagc

SEQ ID NO: 367 - DNA, 30 bp, Artificial Sequence
  Synthetic
ggccagctttccgggcattggcttccatct

SEQ ID NO: 368 - DNA, 30 bp, Artificial Sequence
  Synthetic
gggtgcagccagctttccgggcattggctt

SEQ ID NO: 369 - DNA, 30 bp, Artificial Sequence
  Synthetic
gagcccctggtgcagccagctttccgggca

SEQ ID NO: 370 - DNA, 30 bp, Artificial Sequence
  Synthetic
gatcagacagcccctggtgcagccagcttt

SEQ ID NO: 371 - DNA, 30 bp, Artificial Sequence
  Synthetic
ggcagatcagacagcccctggtgcagccag

SEQ ID NO: 372 - DNA, 30 bp, Artificial Sequence
  Synthetic
gacaggcagatcagacagcccctggtgcag

SEQ ID NO: 373 - DNA, 30 bp, Artificial Sequence
  Synthetic
gtgatgtgggacaggcagatcagacagccc

SEQ ID NO: 374 - DNA, 30 bp, Artificial Sequence
  Synthetic
gacttgatgtgggacaggcagatcagacag

SEQ ID NO: 375 - DNA, 30 bp, Artificial Sequence
  Synthetic
ggggcgtgcacttgatgtgggacaggcaga

SEQ ID NO: 376 - DNA, 30 bp, Artificial Sequence
  Synthetic
gcttcatcttgggcgtgcacttgatgtggg

SEQ ID NO: 377 - DNA, 30 bp, Artificial Sequence
  Synthetic
gtgaacttcttcatcttgggcgtgcacttg

SEQ ID NO: 378 - DNA, 30 bp, Artificial Sequence
  Synthetic
gggatgaacttcttcatcttgggcgtgcac

SEQ ID NO: 379 - DNA, 30 bp, Artificial Sequence
  Synthetic
gtgggatgaacttcttcatcttgggcgtgc

SEQ ID NO: 380 - DNA, 30 bp, Artificial Sequence
  Synthetic
gggcagcgtcctgggatgaacttcttcatc

SEQ ID NO: 381 - DNA, 30 bp, Artificial Sequence
  Synthetic
gggtgtggcagcgtcctgggatgaacttct

SEQ ID NO: 382 - DNA, 30 bp, Artificial Sequence
  Synthetic
gttcgtaggtgtggcagcgtcctgggatga

SEQ ID NO: 383 - DNA, 30 bp, Artificial Sequence
  Synthetic
gcgccttcgtaggtgtggcagcgtcctggg

SEQ ID NO: 384 - DNA, 30 bp, Artificial Sequence
  Synthetic
gtctttgtcgccttcgtaggtgtggcagcg

SEQ ID NO: 385 - DNA, 30 bp, Artificial Sequence
  Synthetic
gctttgtcgccttcgtaggtgtggcagcgt

SEQ ID NO: 386 - DNA, 30 bp, Artificial Sequence
  Synthetic
gtgccgccctgtgcggactctttgtcgcct

SEQ ID NO: 387 - DNA, 30 bp, Artificial Sequence
  Synthetic
gtatgccgccctgtgcggactctttgtcgc

SEQ ID NO: 388 - DNA, 30 bp, Artificial Sequence
  Synthetic
gcctcgcctatgccgccctgtgcggactct

SEQ ID NO: 389 - DNA, 30 bp, Artificial Sequence
  Synthetic
ggatcgcctcgcctatgccgccctgtgcgg

SEQ ID NO: 390 - DNA, 30 bp, Artificial Sequence
  Synthetic
gatgtcgacgatcgcctcgcctatgccgcc

SEQ ID NO: 391 - DNA, 30 bp, Artificial Sequence
  Synthetic
gcaggaatgtcgacgatcgcctcgcctatg

SEQ ID NO: 392 - DNA, 30 bp, Artificial Sequence
  Synthetic
gaatctcaggaatgtcgacgatcgcctcgc

SEQ ID NO: 393 - DNA, 30 bp, Artificial Sequence
  Synthetic
gcccaggaatctcaggaatgtcgacgatcg

SEQ ID NO: 394 - DNA, 30 bp, Artificial Sequence
  Synthetic
gccttgaacccaggaatctcaggaatgtcg

SEQ ID NO: 395 - DNA, 30 bp, Artificial Sequence
  Synthetic
gccaagtccttgaacccaggaatctcagga

SEQ ID NO: 396 - DNA, 30 bp, Artificial Sequence
  Synthetic
gtgggctccaagtccttgaacccaggaatc

SEQ ID NO: 397 - DNA, 30 bp, Artificial Sequence
  Synthetic
gccatgggctccaagtccttgaacccagga

SEQ ID NO: 398 - DNA, 30 bp, Artificial Sequence
  Synthetic
ggaactgctccatgggctccaagtccttga

SEQ ID NO: 399 - DNA, 30 bp, Artificial Sequence
  Synthetic
gtgcgatgaactgctccatgggctccaagt

SEQ ID NO: 400 - DNA, 30 bp, Artificial Sequence
  Synthetic
ggacctgtgcgatgaactgctccatgggct

SEQ ID NO: 401 - DNA, 30 bp, Artificial Sequence
  Synthetic
gacagatcgacctgtgcgatgaactgctcc

SEQ ID NO: 402 - DNA, 30 bp, Artificial Sequence
  Synthetic
gacacacagatcgacctgtgcgatgaactg

SEQ ID NO: 403 - DNA, 30 bp, Artificial Sequence
  Synthetic
gtgcagtccacacacagatcgacctgtgcg

SEQ ID NO: 404 - DNA, 30 bp, Artificial Sequence
  Synthetic
gccagttgtgcagtccacacacagatcgac

SEQ ID NO: 405 - DNA, 30 bp, Artificial Sequence
  Synthetic
gggcagccagttgtgcagtccacacacaga

SEQ ID NO: 406 - DNA, 30 bp, Artificial Sequence
  Synthetic
gtttgaggcagccagttgtgcagtccacac

SEQ ID NO: 407 - DNA, 30 bp, Artificial Sequence
  Synthetic
gaagccctttgaggcagccagttgtgcagt

SEQ ID NO: 408 - DNA, 30 bp, Artificial Sequence
  Synthetic
gcacgttggcaagccctttgaggcagccag

SEQ ID NO: 409 - DNA, 30 bp, Artificial Sequence
  Synthetic
gactgcacgttggcaagccctttgaggcag

SEQ ID NO: 410 - DNA, 30 bp, Artificial Sequence
  Synthetic
gggtcagaacactgcacgttggcaagccct

SEQ ID NO: 411 - DNA, 30 bp, Artificial Sequence
  Synthetic
gcaggtcagaacactgcacgttggcaagcc

SEQ ID NO: 412 - DNA, 30 bp, Artificial Sequence
  Synthetic
gagcaggtcagaacactgcacgttggcaag

SEQ ID NO: 413 - DNA, 30 bp, Artificial Sequence
  Synthetic
ggccacttcttgagcaggtcagaacactgc

SEQ ID NO: 414 - DNA, 30 bp, Artificial Sequence
  Synthetic
gcggcagccacttcttgagcaggtcagaac

SEQ ID NO: 415 - DNA, 30 bp, Artificial Sequence
  Synthetic
gtgcggcagccacttcttgagcaggtcaga

SEQ ID NO: 416 - DNA, 30 bp, Artificial Sequence
  Synthetic
gagcgttgcggcagccacttcttgagcagg

SEQ ID NO: 417 - DNA, 30 bp, Artificial Sequence
  Synthetic
gaaaggtcgcacagcgttgcggcagccact

SEQ ID NO: 418 - DNA, 30 bp, Artificial Sequence
  Synthetic
gctggcaaaggtcgcacagcgttgcggcag

SEQ ID NO: 419 - DNA, 30 bp, Artificial Sequence
  Synthetic
gggcaaaggtcgcacagcgttgcggcagcc

SEQ ID NO: 420 - DNA, 30 bp, Artificial Sequence
  Synthetic
gtggatcttgctggcaaaggtcgcacagcg

SEQ ID NO: 421 - DNA, 30 bp, Artificial Sequence
  Synthetic
gcacctggccctggatcttgctggcaaagg

SEQ ID NO: 422 - DNA, 30 bp, Artificial Sequence
  Synthetic
gtggccctggatcttgctggcaaaggtcgc

SEQ ID NO: 423 - DNA, 30 bp, Artificial Sequence
  Synthetic
gtgatcttgtccacctggccctggatcttg

SEQ ID NO: 424 - DNA, 30 bp, Artificial Sequence
  Synthetic
gccccttgatcttgtccacctggccctgga

SEQ ID NO: 425 - DNA, 30 bp, Artificial Sequence
  Synthetic
gcccttgatcttgtccacctggccctggat

SEQ ID NO: 426 - DNA, 30 bp, Artificial Sequence
  Synthetic
gccttgatcttgtccacctggccctggatc

SEQ ID NO: 427 - DNA, 30 bp, Artificial Sequence
  Synthetic
ggcaaaggtcgcacagcgttgcggcagcca

SEQ ID NO: 428 - DNA, 30 bp, Artificial Sequence
  Synthetic
gcaaaggtcgcacagcgttgcggcagccac

SEQ ID NO: 429 - DNA, 30 bp, Artificial Sequence
  Synthetic
gaaggtcgcacagcgttgcggcagccactt

SEQ ID NO: 430 - DNA, 30 bp, Artificial Sequence
  Synthetic
gaggtcgcacagcgttgcggcagccacttc

SEQ ID NO: 431 - DNA, 31 bp, Artificial Sequence
  Synthetic
ggtaatgcctggcttgtcgacgcatagtctg

SEQ ID NO: 432 - DNA, 31 bp, Artificial Sequence
  Synthetic
gggaaccttggccgttataaagtctgaccag

SEQ ID NO: 433 - DNA, 31 bp, Artificial Sequence
  Synthetic
ggagggtgagaatttagaaccaagattgttg

SEQ ID NO: 434 - DNA, 30 bp, Artificial Sequence
  Synthetic
gagtcctggcaatgaacagtggcgcagtag

SEQ ID NO: 435 - DNA, 30 bp, Artificial Sequence
  Synthetic
gggtgccacagctgctatcaatacattctc

SEQ ID NO: 436 - DNA, 30 bp, Artificial Sequence
  Synthetic
gttacatactgacacattcggcaacatgtt

SEQ ID NO: 437 - DNA, 30 bp, Artificial Sequence
  Synthetic
gtatgtaccaggttcctggaactggaatct

SEQ ID NO: 438 - DNA, 30 bp, Artificial Sequence
  Synthetic
gccttggttccatccaggttctccagggtg

SEQ ID NO: 439 - DNA, 30 bp, Artificial Sequence
  Synthetic
gcagtgatgggattctcagtagcttgagcg

SEQ ID NO: 440 - DNA, 30 bp, Artificial Sequence
  Synthetic
gagcctggcatctcaacaacagcgatggtg

SEQ ID NO: 441 - DNA, 30 bp, Artificial Sequence
  Synthetic
gtgtctggggcgattcttacagatcttcct

SEQ ID NO: 442 - DNA, 30 bp, Artificial Sequence
  Synthetic
gctggatctgaagtgaagtctgtatcttcc

SEQ ID NO: 443 - DNA, 30 bp, Artificial Sequence
  Synthetic
ggcaacgtcatcaggatttccatagagtgg

SEQ ID NO: 444 - DNA, 30 bp, Artificial Sequence
  Synthetic
gaggcgcaggagatggtgtagtagtagaag

SEQ ID NO: 445 - DNA, 30 bp, Artificial Sequence
  Synthetic
gagggaccctggaattggtatcttgctttg

SEQ ID NO: 446 - DNA, 30 bp, Artificial Sequence
  Synthetic
ggtaagagtcaacattcctgtgtgaaacct

SEQ ID NO: 447 - DNA, 30 bp, Artificial Sequence
  Synthetic
gaccagaatctgttttccatcaacaatgag

SEQ ID NO: 448 - DNA, 30 bp, Artificial Sequence
  Synthetic
gatggctgtagtcagtatgtcaccatcttg

SEQ ID NO: 449 - DNA, 30 bp, Artificial Sequence
  Synthetic
gtaccatcgaatggatctctaatatgtacg

SEQ ID NO: 450 - DNA, 30 bp, Artificial Sequence
  Synthetic
gagatcacaggctccttcagcatcaaaaga

SEQ ID NO: 451 - DNA, 30 bp, Artificial Sequence
  Synthetic
gctttgaccggcgaagagactattgcagag

SEQ ID NO: 452 - DNA, 30 bp, Artificial Sequence
  Synthetic
gcccctcaggcaatactcgtacatgcatcg

SEQ ID NO: 453 - DNA, 30 bp, Artificial Sequence
  Synthetic
gctggtacttctagggtgtctccatgcttt

SEQ ID NO: 454 - DNA, 31 bp, Artificial Sequence; identical to SEQ ID NO: 431
  Synthetic

SEQ ID NO: 455 - DNA, 31 bp, Artificial Sequence; identical to SEQ ID NO: 432
  Synthetic

SEQ ID NO: 456 - DNA, 31 bp, Artificial Sequence; identical to SEQ ID NO: 433
  Synthetic

SEQ ID NO: 457 - DNA, 31 bp, Artificial Sequence; identical to SEQ ID NO: 179
  Synthetic

SEQ ID NO: 458 - DNA, 31 bp, Artificial Sequence; identical to SEQ ID NO: 180
  Synthetic

SEQ ID NO: 459 - DNA, 31 bp, Artificial Sequence; identical to SEQ ID NO: 181
  Synthetic

SEQ ID NO: 460 - DNA, 31 bp, Artificial Sequence; identical to SEQ ID NO: 182
  Synthetic

SEQ ID NO: 461 - DNA, 31 bp, Artificial Sequence; identical to SEQ ID NO: 183
  Synthetic

SEQ ID NO: 462 - DNA, 31 bp, Artificial Sequence; identical to SEQ ID NO: 184
  Synthetic

SEQ ID NO: 463 - DNA, 31 bp, Artificial Sequence; identical to SEQ ID NO: 185
  Synthetic

SEQ ID NO: 464 - DNA, 31 bp, Artificial Sequence; identical to SEQ ID NO: 186
  Synthetic

SEQ ID NO: 465 - DNA, 31 bp, Artificial Sequence; identical to SEQ ID NO: 187
  Synthetic

SEQ ID NO: 466 - DNA, 31 bp, Artificial Sequence; identical to SEQ ID NO: 188
  Synthetic

SEQ ID NO: 467 - DNA, 31 bp, Artificial Sequence; identical to SEQ ID NO: 189
  Synthetic

SEQ ID NO: 468 - DNA, 31 bp, Artificial Sequence; identical to SEQ ID NO: 190
  Synthetic

SEQ ID NO: 469 - DNA, 31 bp, Artificial Sequence; identical to SEQ ID NO: 191
  Synthetic

SEQ ID NO: 470 - DNA, 31 bp, Artificial Sequence; identical to SEQ ID NO: 192
  Synthetic

SEQ ID NO: 471 - DNA, 31 bp, Artificial Sequence; identical to SEQ ID NO: 193
  Synthetic

SEQ ID NO: 472 - DNA, 51 bp, Artificial Sequence; identical to SEQ ID NO: 194
  Synthetic

SEQ ID NO: 473 - DNA, 51 bp, Artificial Sequence; identical to SEQ ID NO: 195
  Synthetic

SEQ ID NO: 474 - DNA, 51 bp, Artificial Sequence; identical to SEQ ID NO: 196
  Synthetic

SEQ ID NO: 475 - DNA, 51 bp, Artificial Sequence; identical to SEQ ID NO: 197
  Synthetic

SEQ ID NO: 476 - DNA, 51 bp, Artificial Sequence; identical to SEQ ID NO: 198
  Synthetic

SEQ ID NO: 477 - DNA, 51 bp, Artificial Sequence; identical to SEQ ID NO: 199
  Synthetic

SEQ ID NO: 478 - DNA, 51 bp, Artificial Sequence; identical to SEQ ID NO: 200
  Synthetic

SEQ ID NO: 479 - DNA, 51 bp, Artificial Sequence; identical to SEQ ID NO: 201
  Synthetic

SEQ ID NO: 480 - DNA, 51 bp, Artificial Sequence; identical to SEQ ID NO: 202
  Synthetic

SEQ ID NO: 481 - DNA, 51 bp, Artificial Sequence; identical to SEQ ID NO: 203
  Synthetic

SEQ ID NO: 482 - DNA, 51 bp, Artificial Sequence; identical to SEQ ID NO: 204
  Synthetic

SEQ ID NO: 483 - DNA, 51 bp, Artificial Sequence; identical to SEQ ID NO: 205
  Synthetic

SEQ ID NO: 484 - DNA, 51 bp, Artificial Sequence; identical to SEQ ID NO: 206
  Synthetic

SEQ ID NO: 485 - DNA, 51 bp, Artificial Sequence; identical to SEQ ID NO: 207
  Synthetic

SEQ ID NO: 486 - DNA, 51 bp, Artificial Sequence; identical to SEQ ID NO: 208
  Synthetic

SEQ ID NO: 487 - DNA, 51 bp, Artificial Sequence; identical to SEQ ID NO: 209
  Synthetic

SEQ ID NO: 488 - DNA, 51 bp, Artificial Sequence; identical to SEQ ID NO: 210
  Synthetic

SEQ ID NO: 489 - DNA, 51 bp, Artificial Sequence; identical to SEQ ID NO: 211
  Synthetic

SEQ ID NO: 490 - DNA, 51 bp, Artificial Sequence; identical to SEQ ID NO: 212
  Synthetic

SEQ ID NO: 491 - DNA, 51 bp, Artificial Sequence; identical to SEQ ID NO: 213
  Synthetic

SEQ ID NO: 492 - DNA, 51 bp, Artificial Sequence; identical to SEQ ID NO: 214
  Synthetic

SEQ ID NO: 493 - DNA, 51 bp, Artificial Sequence; identical to SEQ ID NO: 215
  Synthetic

SEQ ID NO: 494 - DNA, 51 bp, Artificial Sequence; identical to SEQ ID NO: 216
  Synthetic

SEQ ID NO: 495 - DNA, 51 bp, Artificial Sequence; identical to SEQ ID NO: 217
  Synthetic

SEQ ID NO: 496 - DNA, 51 bp, Artificial Sequence; identical to SEQ ID NO: 218
  Synthetic

SEQ ID NO: 497 - DNA, 71 bp, Artificial Sequence; identical to SEQ ID NO: 219
  Synthetic

SEQ ID NO: 498 - DNA, 71 bp, Artificial Sequence; identical to SEQ ID NO: 220
  Synthetic

SEQ ID NO: 499 - DNA, 71 bp, Artificial Sequence; identical to SEQ ID NO: 221
  Synthetic

SEQ ID NO: 500 - DNA, 71 bp, Artificial Sequence; identical to SEQ ID NO: 222
  Synthetic

SEQ ID NO: 501 - DNA, 71 bp, Artificial Sequence; identical to SEQ ID NO: 223
  Synthetic

SEQ ID NO: 502 - DNA, 71 bp, Artificial Sequence; identical to SEQ ID NO: 224
  Synthetic

SEQ ID NO: 503 - DNA, 71 bp, Artificial Sequence; identical to SEQ ID NO: 225
  Synthetic

SEQ ID NO: 504 - DNA, 71 bp, Artificial Sequence; identical to SEQ ID NO: 226
  Synthetic

SEQ ID NO: 505 - DNA, 71 bp, Artificial Sequence; identical to SEQ ID NO: 227
  Synthetic

SEQ ID NO: 506 - DNA, 71 bp, Artificial Sequence; identical to SEQ ID NO: 228
  Synthetic

SEQ ID NO: 507 - DNA, 71 bp, Artificial Sequence; identical to SEQ ID NO: 229
  Synthetic

SEQ ID NO: 508 - DNA, 71 bp, Artificial Sequence; identical to SEQ ID NO: 230
  Synthetic

SEQ ID NO: 509 - DNA, 71 bp, Artificial Sequence; identical to SEQ ID NO: 231
  Synthetic

SEQ ID NO: 510 - DNA, 71 bp, Artificial Sequence; identical to SEQ ID NO: 232
  Synthetic

SEQ ID NO: 511 - DNA, 71 bp, Artificial Sequence; identical to SEQ ID NO: 233
  Synthetic

SEQ ID NO: 512 - DNA, 71 bp, Artificial Sequence; identical to SEQ ID NO: 234
  Synthetic

SEQ ID NO: 513 - DNA, 71 bp, Artificial Sequence; identical to SEQ ID NO: 235
  Synthetic

SEQ ID NO: 514 - DNA, 71 bp, Artificial Sequence; identical to SEQ ID NO: 236
  Synthetic

SEQ ID NO: 515 - DNA, 71 bp, Artificial Sequence; identical to SEQ ID NO: 237
  Synthetic

SEQ ID NO: 516 - DNA, 71 bp, Artificial Sequence; identical to SEQ ID NO: 238
  Synthetic

SEQ ID NO: 517 - DNA, 71 bp, Artificial Sequence; identical to SEQ ID NO: 239
  Synthetic

SEQ ID NO: 518 - DNA, 71 bp, Artificial Sequence; identical to SEQ ID NO: 240
  Synthetic

SEQ ID NO: 519 - DNA, 71 bp, Artificial Sequence; identical to SEQ ID NO: 241
  Synthetic

SEQ ID NO: 520 - DNA, 71 bp, Artificial Sequence; identical to SEQ ID NO: 242
  Synthetic

SEQ ID NO: 521 - DNA, 71 bp, Artificial Sequence; identical to SEQ ID NO: 243
  Synthetic

SEQ ID NO: 522 - DNA, 71 bp, Artificial Sequence; identical to SEQ ID NO: 244
  Synthetic

SEQ ID NO: 523 - DNA, 71 bp, Artificial Sequence; identical to SEQ ID NO: 245
  Synthetic

SEQ ID NO: 524 - DNA, 71 bp, Artificial Sequence; identical to SEQ ID NO: 246
  Synthetic

SEQ ID NO: 525 - DNA, 71 bp, Artificial Sequence; identical to SEQ ID NO: 247
  Synthetic

SEQ ID NO: 526 - DNA, 71 bp, Artificial Sequence; identical to SEQ ID NO: 248
  Synthetic

SEQ ID NO: 527 - DNA, 71 bp, Artificial Sequence; identical to SEQ ID NO: 249
  Synthetic

SEQ ID NO: 528 - DNA, 71 bp, Artificial Sequence; identical to SEQ ID NO: 250
  Synthetic

SEQ ID NO: 529 - DNA, 71 bp, Artificial Sequence; identical to SEQ ID NO: 251
  Synthetic

SEQ ID NO: 530 - DNA, 71 bp, Artificial Sequence; identical to SEQ ID NO: 252
  Synthetic

SEQ ID NO: 531 - DNA, 71 bp, Artificial Sequence; identical to SEQ ID NO: 253
  Synthetic

SEQ ID NO: 532 - DNA, 85 bp, Artificial Sequence; identical to SEQ ID NO: 254
  Synthetic

SEQ ID NO: 533 - DNA, 85 bp, Artificial Sequence; identical to SEQ ID NO: 255
  Synthetic

SEQ ID NO: 534 - DNA, 85 bp, Artificial Sequence; identical to SEQ ID NO: 256
  Synthetic

SEQ ID NO: 535 - DNA, 85 bp, Artificial Sequence; identical to SEQ ID NO: 257
  Synthetic

SEQ ID NO: 536 - DNA, 85 bp, Artificial Sequence; identical to SEQ ID NO: 258
  Synthetic

SEQ ID NO: 537 - DNA, 85 bp, Artificial Sequence; identical to SEQ ID NO: 259
  Synthetic

SEQ ID NO: 538 - DNA, 85 bp, Artificial Sequence; identical to SEQ ID NO: 260
  Synthetic

SEQ ID NO: 539 - DNA, 85 bp, Artificial Sequence; identical to SEQ ID NO: 261
  Synthetic

SEQ ID NO: 540 - DNA, 85 bp, Artificial Sequence; identical to SEQ ID NO: 262
  Synthetic

SEQ ID NO: 541 - DNA, 85 bp, Artificial Sequence; identical to SEQ ID NO: 263
  Synthetic

SEQ ID NO: 542 - DNA, 85 bp, Artificial Sequence; identical to SEQ ID NO: 264
  Synthetic

SEQ ID NO: 543 - DNA, 85 bp, Artificial Sequence; identical to SEQ ID NO: 265
  Synthetic

SEQ ID NO: 544 - DNA, 85 bp, Artificial Sequence; identical to SEQ ID NO: 266
  Synthetic

SEQ ID NO: 545 - DNA, 85 bp, Artificial Sequence; identical to SEQ ID NO: 267
  Synthetic

SEQ ID NO: 546 - DNA, 85 bp, Artificial Sequence; identical to SEQ ID NO: 268
  Synthetic

SEQ ID NO: 547 - DNA, 85 bp, Artificial Sequence; identical to SEQ ID NO: 269
  Synthetic

SEQ ID NO: 548 - DNA, 85 bp, Artificial Sequence; identical to SEQ ID NO: 270
  Synthetic

SEQ ID NO: 549 - DNA, 85 bp, Artificial Sequence; identical to SEQ ID NO: 271
  Synthetic

SEQ ID NO: 550 - DNA, 85 bp, Artificial Sequence; identical to SEQ ID NO: 272
  Synthetic

SEQ ID NO: 551 - DNA, 85 bp, Artificial Sequence; identical to SEQ ID NO: 273
  Synthetic

SEQ ID NO: 552 - DNA, 85 bp, Artificial Sequence; identical to SEQ ID NO: 274
  Synthetic

SEQ ID NO: 553 - DNA, 85 bp, Artificial Sequence; identical to SEQ ID NO: 275
  Synthetic

SEQ ID NO: 554 - DNA, 85 bp, Artificial Sequence; identical to SEQ ID NO: 276
  Synthetic

SEQ ID NO: 555 - DNA, 85 bp, Artificial Sequence; identical to SEQ ID NO: 277
  Synthetic

SEQ ID NO: 556 - DNA, 85 bp, Artificial Sequence; identical to SEQ ID NO: 278
  Synthetic

SEQ ID NO: 557 - DNA, 85 bp, Artificial Sequence; identical to SEQ ID NO: 279
  Synthetic

SEQ ID NO: 558 - DNA, 85 bp, Artificial Sequence; identical to SEQ ID NO: 280
  Synthetic

SEQ ID NO: 559 - DNA, 85 bp, Artificial Sequence; identical to SEQ ID NO: 281
  Synthetic

SEQ ID NO: 560 - DNA, 85 bp, Artificial Sequence; identical to SEQ ID NO: 282
  Synthetic

SEQ ID NO: 561 - DNA, 85 bp, Artificial Sequence; identical to SEQ ID NO: 283
  Synthetic

SEQ ID NO: 562 - DNA, 85 bp, Artificial Sequence; identical to SEQ ID NO: 284
  Synthetic

SEQ ID NO: 563 - DNA, 85 bp, Artificial Sequence; identical to SEQ ID NO: 285
  Synthetic

SEQ ID NO: 564 - DNA, 85 bp, Artificial Sequence; identical to SEQ ID NO: 286
  Synthetic

SEQ ID NO: 565 - DNA, 85 bp, Artificial Sequence; identical to SEQ ID NO: 287
  Synthetic

SEQ ID NO: 566 - DNA, 85 bp, Artificial Sequence; identical to SEQ ID NO: 288
  Synthetic

SEQ ID NO: 567 - DNA, 85 bp, Artificial Sequence; identical to SEQ ID NO: 289
  Synthetic

SEQ ID NO: 568 - DNA, 85 bp, Artificial Sequence; identical to SEQ ID NO: 290
  Synthetic

SEQ ID NO: 569 - DNA, 85 bp, Artificial Sequence; identical to SEQ ID NO: 291
  Synthetic

SEQ ID NO: 570 - DNA, 85 bp, Artificial Sequence; identical to SEQ ID NO: 292
  Synthetic

SEQ ID NO: 571 - DNA, 85 bp, Artificial Sequence; identical to SEQ ID NO: 293
  Synthetic

SEQ ID NO: 572 - DNA, 85 bp, Artificial Sequence; identical to SEQ ID NO: 294
  Synthetic

SEQ ID NO: 573 - DNA, 85 bp, Artificial Sequence; identical to SEQ ID NO: 295
  Synthetic

SEQ ID NO: 574 - DNA, 30 bp, Artificial Sequence
  Synthetic
gtaatgcctggcttgtcgacgcatagtctg

SEQ ID NO: 575 - DNA, 51 bp, Artificial Sequence
  Synthetic
gaaaacgcaggttcctccagtttcgggagcagcgcacgtctccctgtagtc

SEQ ID NO: 576 - DNA, 51 bp, Artificial Sequence
  Synthetic
gacgcaggttcctctagcttcgggagcagcgcacgtctccctgtagtcaag

SEQ ID NO: 577 - DNA, 30 bp, Artificial Sequence; identical to SEQ ID NO: 574
  Synthetic

SEQ ID NO: 578 - DNA, 51 bp, Artificial Sequence; identical to SEQ ID NO: 202
  Synthetic

SEQ ID NO: 579 - DNA, 30 bp, Artificial Sequence; identical to SEQ ID NO: 574
  Synthetic

SEQ ID NO: 580 - DNA, 51 bp, Artificial Sequence
  Synthetic
gcaaggccacaaaattatccactgtttttggaacagtctttccgaagagac

SEQ ID NO: 581 - DNA, 51 bp, Artificial Sequence
  Synthetic
gcctgtagccaaggccacaaaattatccactgtttttggaacagtctttcc

SEQ ID NO: 582 - DNA, 51 bp, Artificial Sequence
  Synthetic
gctttctctcctgtagccaaggccacaaaattatccactgtttttggaaca

SEQ ID NO: 583 - DNA, 51 bp, Artificial Sequence
  Synthetic
ggccaaatcctttctctcctgtagccaaggccacaaaattatccactgttt

SEQ ID NO: 584 - DNA, 51 bp, Artificial Sequence
  Synthetic
gtttttgtagccaaatcctttctctcctgtagccaaggccacaaaattatc

SEQ ID NO: 585 - DNA, 51 bp, Artificial Sequence
  Synthetic
gatttgctgtttttgtagccaaatcctttctctcctgtagccaaggccaca

SEQ ID NO: 586 - DNA, 51 bp, Artificial Sequence
  Synthetic
gacgatggaatttgctgtttttgtagccaaatcctttctctcctgtagcca

SEQ ID NO: 587 - DNA, 51 bp, Artificial Sequence
  Synthetic
gatagaatgttctaaacgatcctgcggcctctactctgcattcaattacat

SEQ ID NO: 588 - DNA, 51 bp, Artificial Sequence
  Synthetic
gatagaatgttctaaacaatcctgcggcctctactctgcattcaattacat

SEQ ID NO: 589 - DNA, 51 bp, Artificial Sequence
  Synthetic
gatagaatgttctaaactatcctgcggcctctactctgcattcaattacat

SEQ ID NO: 590 - DNA, 51 bp, Artificial Sequence
  Synthetic
ggtcccacgcggcccacagctgcaccaggaagaagggtgcccagcacagca

SEQ ID NO: 591 - DNA, 51 bp, Artificial Sequence
  Synthetic
ggggtcccacgcggcccacagctgcaccaggaagaagggtgcccagcacag

SEQ ID NO: 592 - DNA, 51 bp, Artificial Sequence
  Synthetic
gccgggtcccacgcggcccacagctgcaccaggaagaagggtgcccagcac

SEQ ID NO: 593 - DNA, 51 bp, Artificial Sequence
  Synthetic
gggtgatgacatcccaggcgatcgtgtggcctccaggagcccagagcagga

SEQ ID NO: 594 - DNA, 51 bp, Artificial Sequence
  Synthetic
gagggtgatgacatcccaggcgatcgtgtggcctccaggagcccagagcag

SEQ ID NO: 595 - DNA, 51 bp, Artificial Sequence
  Synthetic
gatcagggtgatgacatcccaggcgatcgtgtggcctccaggagcccagag

SEQ ID NO: 596 - DNA, 51 bp, Artificial Sequence
  Synthetic
ggtggctccattcactccaatgctgagcacttccacagagtgggttaaagc

SEQ ID NO: 597 - DNA, 51 bp, Artificial Sequence
  Synthetic
gtttctaatatattttgccagactgatggactattctcaattaataatgat

SEQ ID NO: 598 - DNA, 51 bp, Artificial Sequence
  Synthetic
gagatgttgctgtggatccagtccacagccagcccgtcgggggcctggatg

SEQ ID NO: 599 - DNA, 51 bp, Artificial Sequence
  Synthetic
gcaggccggcccagctgccaggtgcacctgctcggagcatcgggccggatc

SEQ ID NO: 600 - DNA, 51 bp, Artificial Sequence
  Synthetic
gcaaagaacctctgggtccaagggtagaccaccagcagcctgcccagggcc

SEQ ID NO: 601 - DNA, 51 bp, Artificial Sequence
  Synthetic
gaagagaaacttagtttccagggctttggtagagggcaaaggttgatagca

SEQ ID NO: 602 - DNA, 51 bp, Artificial Sequence
  Synthetic
gtcagcctagtgcagagccactggtagttggtggttagagtttcaagttcc

SEQ ID NO: 603 - DNA, 51 bp, Artificial Sequence
  Synthetic
ggctcattgtgaacaggccagtaatgtccgggatggggcggcataggcggg

SEQ ID NO: 604 - DNA, 51 bp, Artificial Sequence
  Synthetic
gtagctaaagaacttgaccaagacatatcaggatccacctcagctcctaga

SEQ ID NO: 605 - DNA, 51 bp, Artificial Sequence
  Synthetic
ggggcattgttctgtgcccagtcctgctggtagacctgctccccggtggct

SEQ ID NO: 606 - DNA, 51 bp, Artificial Sequence
  Synthetic
gagaagtcgttcatgtgccaccgtgggagcgtacagtcatcattgatcttg

SEQ ID NO: 607 - DNA, 51 bp, Artificial Sequence
  Synthetic
gggattaatgctgaacgcaccaaagttcatcccaccacccatattactacc

SEQ ID NO: 608 - DNA, 51 bp, Artificial Sequence
  Synthetic
gctccaaaggctttcctccactgttgcaaagttattgaatcccaagacaca

SEQ ID NO: 609 - DNA, 51 bp, Artificial Sequence
  Synthetic
gatgaatgaacgatttcccagaactccctaatcagaacagagtccctggta

SEQ ID NO: 610 - DNA, 51 bp, Artificial Sequence
  Synthetic
ggagcctctgccggagcccagagaacccgagagtcagacagagccagcgcc

SEQ ID NO: 611 - DNA, 51 bp, Artificial Sequence
  Synthetic
ggcttccgtggagacacccaatcaatttgaagagatcttgaagtgatgcca

SEQ ID NO: 612 - DNA, 51 bp, Artificial Sequence
  Synthetic
gtgggactgccctcctcccatttgcagatgccgtcgtagaatcgcagcagg

SEQ ID NO: 613 - DNA, 51 bp, Artificial Sequence
  Synthetic
gcttcttcaatagttctccagctacactggcaggcatatgcccgtgttcct

SEQ ID NO: 614 - DNA, 51 bp, Artificial Sequence
  Synthetic
gattccttttcttcgtcccaattcacctcagtggctagtcgaagaatgaag

SEQ ID NO: 615 - DNA, 51 bp, Artificial Sequence
  Synthetic
gcagcttcagcaccttccagtcagactcctgcttcaagcactgcagcagga

SEQ ID NO: 616 - DNA, 51 bp, Artificial Sequence
  Synthetic
gccatttgcttgcagtgccactccagaggattccggattgccataaatact

SEQ ID NO: 617 - DNA, 51 bp, Artificial Sequence
  Synthetic
gttcaatagttttggtccagtatcgtttacagcccttcttggtagatttca

SEQ ID NO: 618 - DNA, 51 bp, Artificial Sequence
  Synthetic
ggcaaccgtcttctgaccaaatggcagaacatttgtccccaactttccact

SEQ ID NO: 619 - DNA, 51 bp, Artificial Sequence
  Synthetic
gcgactttccaatgaaccactgaagcccaggtatgacaaagccgatgatct

SEQ ID NO: 620 - DNA, 51 bp, Artificial Sequence
  Synthetic
gtttacactcatgcttccacagctttaacagatcatttggttccttgatga

SEQ ID NO: 621 - DNA, 51 bp, Artificial Sequence
  Synthetic
gcttaagcttccgtgtccagccttcaggcagggtggggtcatcatacatgg

SEQ ID NO: 622 - DNA, 51 bp, Artificial Sequence
  Synthetic
ggacagctgggctgatccatgatgtcatccagaaacactggggaccctcag

SEQ ID NO: 623 - DNA, 51 bp, Artificial Sequence
  Synthetic
gtctcatctcaactttccatatccgtatcatggaatcatagcatcctgtaa

SEQ ID NO: 624 - DNA, 51 bp, Artificial Sequence
  Synthetic
gcatgcagacgcggttccactcgcagccacagttccagcaccactcgagcc

SEQ ID NO: 625 - DNA, 51 bp, Artificial Sequence
  Synthetic
gttggttagggtcaacccagtattctccactcttgagttcaggatggcaga

SEQ ID NO: 626 - DNA, 51 bp, Artificial Sequence
  Synthetic
gctacactgtccaacacccactctcgggtcaccacaggtgcctcacacatc

SEQ ID NO: 627 - DNA, 51 bp, Artificial Sequence
  Synthetic
gctgcactgtgtacccccagagctccgtgttgccgacatcctggggtggct

SEQ ID NO: 628 - DNA, 51 bp, Artificial Sequence
  Synthetic
gagcttcctgccactcccaacaggtttcacagtaagcgcgtatctgttcca

SEQ ID NO: 629 - DNA, 51 bp, Artificial Sequence
  Synthetic
gacggcaagagcttacccagtcacttgtgtggagacttaaatacttgcata

SEQ ID NO: 630 - DNA, 51 bp, Artificial Sequence; identical to SEQ ID NO: 580
  Synthetic

SEQ ID NO: 631 - DNA, 51 bp, Artificial Sequence; identical to SEQ ID NO: 581
  Synthetic

SEQ ID NO: 632 - DNA, 51 bp, Artificial Sequence; identical to SEQ ID NO: 582
  Synthetic

SEQ ID NO: 633 - DNA, 51 bp, Artificial Sequence; identical to SEQ ID NO: 583
  Synthetic

SEQ ID NO: 634 - DNA, 51 bp, Artificial Sequence; identical to SEQ ID NO: 584
  Synthetic

SEQ ID NO: 635 - DNA, 51 bp, Artificial Sequence; identical to SEQ ID NO: 585
  Synthetic

SEQ ID NO: 636 - DNA, 51 bp, Artificial Sequence; identical to SEQ ID NO: 586
  Synthetic

SEQ ID NO: 637 - DNA, 30 bp, Artificial Sequence; identical to SEQ ID NO: 574
  Synthetic

SEQ ID NO: 638 - DNA, 51 bp, Artificial Sequence; identical to SEQ ID NO: 202
  Synthetic

SEQ ID NO: 639 - DNA, 34 bp, Artificial Sequence
  Synthetic
gcagggttttcccagtcacgacgttgtaaagttg

SEQ ID NO: 640 - DNA, 51 bp, Artificial Sequence
  Synthetic
gtcaaggcactcttgcccacgccaccagctccaactaccacaagtttatat

SEQ ID NO: 641 - DNA, 51 bp, Artificial Sequence
  Synthetic
gcaaagatcacccggcccacatcttcatctccaattcgtaggtcaaaatac

SEQ ID NO: 642 - DNA, 51 bp, Artificial Sequence
  Synthetic
gcgccaccagctccaaccaccacaagtttatattcagtcattttcagcagg

SEQ ID NO: 643 - DNA, 51 bp, Artificial Sequence
  Synthetic
gtttctccatcaattaccacttgcttcctgtaggaatcctctattgttgga

SEQ ID NO: 644 - DNA, 51 bp, Artificial Sequence; identical to SEQ ID NO: 582
  Synthetic

SEQ ID NO: 645 - DNA, 30 bp, Artificial Sequence; identical to SEQ ID NO: 574
  Synthetic

SEQ ID NO: 646 - DNA, 83 bp, Artificial Sequence
  Synthetic
tctttccataggccctgaaaaagggcctgttctaaaccatcctgcggcctctactcggccctgaaaaagggccattcaattac

SEQ ID NO: 647 - DNA, 83 bp, Artificial Sequence
  Synthetic
cagctggcgaggccctgaaaaagggccggggatgtgccgcaaggcgattaagttggggccctgaaaaagggccacgccagggt

SEQ ID NO: 648 - DNA, 79 bp, Artificial Sequence
  Synthetic
gtggaatagtataacaatatgctaaatgttgttatagtatcccactctaaaccatcctgcggggccctcttcagggccc

SEQ ID NO: 649 - DNA, 79 bp, Artificial Sequence
  Synthetic
gtggaatagtataacaatatgctaaatgttgttatagtatcccacaccctggcgttacccagggccctcttcagggccc

SEQ ID NO: 650 - protein, 385 aa, Homo sapiens
QLHLPQVLADAVSRLVLGKFGDLTDNFSSPHARRKVLAGVVMTTGTDVKDAKVISVSTGTKCINGEYMSDRGLALNDCHAEIISRRSLLRFLYTQLELYLNNKDDQKRSIFQKSERGGFRLKENVQFHLYISTSPCGDARIFSPHEPILEEPADRHPNRKARGQLRTKIESGQGTIPVRSNASIQTWDGVLQGERLLTMSCSDKIARWNVVGIQGSLLSIFVEPIYFSSIILGSLYHGDHLSRAMYQRISNIEDLPPLYTLNKPLLSGISNAEARQPGKAPNFSVNWTVGDSAIEVINATTGKDELGRASRLCKHALYCRWMRVHGKVPSHLLRSKITKPNVYHESKLAAKEYQAAKARLFTAFIKAGLGAWVEKPTEQDQFSLT

SEQ ID NO: 651 - protein, 336 aa, Homo sapiens
SLGTGNRCVKGDSLSLKGETVNDCHAEIISRRGFIRFLYSELMKYNSQTAKDSIFEPAKGGEKLQIKKTVSFHLYISTAPCGDGALFDKSCSDRAMESTESRHYPVFENPKQGKLRTKVENGQGTIPVESSDIVPTWDGIRLGERLRTMSCSDKILRWNVLGLQGALLTHFLQPIYLKSVTLGYLFSQGHLTRAICCRVTRDGSAFEDGLRHPFIVNHPKVGRVSIYDSKRQSGKTKETSVNWCLADGYDLEILDGTRGTVDGPRNELSRVSKKNIFLLFKKLCSFRYRRDLLRLSYGEAKKAARDYETAKNYFKKGLKDMGYGNWISKPQEEKNF

SEQ ID NO: 652 - protein, 340 aa, Octopus vulgaris
SVGTGNRCLTGDHLSLEGNSVNDSHAEMITRRGFLRYLYRHLLEYDAEVPNDLFEKGERSICRIKTNITFHLYISTAPCGDGALFSPRDTDSSNAKMEEENKHIHNPTFSSSVQGLLRTKVEGGQGTIPIDADFTEQTWDGIQRGERLRTMSCSDKICRWNVVGLQGALLSHFIEPIYLDSLTLGYLYDHGHLARAVCCRIERGEASVNQLLPEGYRLNHPWLGRVTACDPPRETQKTKSLSINWCYDDEKSEVLDGTAGICYTAIEKNLFSRLTKHNLYEEFKRVCRKFDRNDLLTAPSYNKAKMMATPFQTAKNVMLKKLKENNCGTWVSKPIEEEMF

SEQ ID NO: 653 - protein, 340 aa, Sepia
SVGTGNRCLTGDRLSLEGNSVNDSHAEMVTRRGFLRYLYKHLLEYDPEKPHDLFEKGERSLCRIKTNITFHLYISTAPCGDGALFSPRDTDSSNVKVDEENKHVHNPTFSSSVQGLLRTKVEGGQGTIPIDADFTEQTWDGIQRGERLRTMSCSDKICRWNVVGLQGALLSHFVEPIYLESLTLGYLYDHGHLARAVCCRIERGEASVNQLLPEGYRLNHPWLGRVTACDPPRETQKTKSLSINWCYDDEKSEVLDGTAGICYTAIEKNLFSRLTKHSLYEEFKKVCQKFEREDLLNVTSYNKAKMMAIPFQTAKNVMLKKLKENNCGTWVSKPIEEEMF

SEQ ID NO: 654 - protein, 328 aa, Octopus vulgaris
GIGTGTKCINGEHMSDRGFGVNDCHAEIIARRCFLRYIYDQLELHLSDNSDVRNSSIFELRDKGGYQLKENIQFHLYISTAPCGDARIFSPHGQDVETGDRHPNRKARGQLRTKIESGQGTIPVRTSGVIQTWDGVLEGERLLTMSCSDKIARWNVLGIQGSLLSHFMNPIYLESIILGSLYHSDHLSRAMYSRISIIENLPEPFHLNRPFLSGISSPESRQPGKAPNFGINWRKEDETFEVINAMTGRVEGGSVSRICKQALFGRFMSLYGKLSSLTGQSVTTRPTHYSDAKAAVMEYQLAKQCVFQAFQKAGLGNWVQKPIEQDQF

SEQ ID NO: 655 - protein, 328 aa, Sepia
GIGTGTKCINGEYMNDRGFAVNDCHAEIIARRCFLRFIYDQLEMHLSEDPEVRGQSVFELRDGGGYKLKPNIHFHLYISTAPCGDARIFSPHGQDVETGDRHPNRKARGQLRTKIESGQGTIPVRSSGFIQTWDGVLEGERLLTMSCSDKIARWNVLGIQGALLCHFMHPIYLESIILGSLYHSDHLSRAVYCRIASIENLPDLFQLNRPFLSGISSPESRQPGKAPNFGINWRRNDDTFEVINAMTGRVEGGNMSRICKQALFDRFMNLYGRLSSLTGQSVTTRPTLYSEAKAAVMEYQLAKQCVFQAFQKAGLGNWVQKPIEQDQF

SEQ ID NO: 656 - protein, 328 aa, Doryteusthis opalescens
GIGTGTKCINGEYMNDRGFAVNDCHAEIIARRCFLRFIYDQLELHLSDNAEVRGQSIFELRDAGGYKLKPNIQFHLYISTAPCGDARIFSPHGQDVETGDRHPNRKARGQLRTKIESGQGTIPVRSSGFIQTWDGVLEGERLLTMSCSDKIARWNVLGVQGALLCHFMHPIYLESIILGSLYHSDHLSRAVYCRIAAIENLPDLFRLNRPFLSGISSPESRQPGKAPNFGINWRRNDDSFEVINAMTGRVEGGSMSRICKQALFDRFMNLYGKLSSLTGQSVTTRPALYSEAKATVMEYQLAKQCVFQAFQKAGLGNWVQKPIEQDQF

SEQ ID NO: 657 - DNA, 57 bp, Artificial Sequence
  Synthetic
gaatgcagagtagaggccgcaggatagtttagaacattctatggaaagagattccag

SEQ ID NO: 658 - DNA, 88 bp, Artificial Sequence
  Synthetic
ttgccgaatgtgtcagtatgtaattgaatgcagagtagaggccgcaggatagtttagaacattctatggaaagagattccagttccag

SEQ ID NO: 659 - DNA, 88 bp, Artificial Sequence
  Synthetic
gtggaactggaatctctttccatagaatgttctaaactatcctgcggcctctactctgcattcaattacatactgacacattcggcaa

SEQ ID NO: 660 - protein, 28 aa, Artificial Sequence
  Synthetic
CRMCQYVIECRVEAAGFRTFYGKRFQFQ

SEQ ID NO: 661 - RNA, 19 nt, Artificial Sequence
  Synthetic
augacauggacugauuugc

SEQ ID NO: 662 - RNA, 19 nt, Artificial Sequence
  Synthetic
  misc_feature (1)..(19): "n"  represents inosine
augacnuggacugauuugc

SEQ ID NO: 663 - RNA, 19 nt, Artificial Sequence
  Synthetic
uacugcaccggacgaaacg

SEQ ID NO: 664 - RNA, 19 nt, Artificial Sequence
  Synthetic
uacugcaccggacgaaacg

SEQ ID NO: 665 - RNA, 19 nt, Artificial Sequence
  Synthetic
  misc_feature (1)..(19): "n" is any nucleotide
augacauggacugauuugc

SEQ ID NO: 666 - RNA, 19 nt, Artificial Sequence
  Synthetic
  misc_feature (1)..(19): "n" represents inosine
augacnuggacugauuugc

SEQ ID NO: 667 - RNA, 19 nt, Artificial Sequence
  Synthetic
uacugcaccagacaaaacg

SEQ ID NO: 668 - RNA, 19 nt, Artificial Sequence
  Synthetic
uacugcaccagacaaaacg

SEQ ID NO: 669 - RNA, 19 nt, Artificial Sequence
  Synthetic
augacauggacugauuugc

SEQ ID NO: 670 - RNA, 19 nt, Artificial Sequence
  Synthetic
  misc_feature (1)..(19): "n" represents inosine
augacnuggacugnuuugc

SEQ ID NO: 671 - RNA, 19 nt, Artificial Sequence
  Synthetic
uacugcaccggaccaaacg

SEQ ID NO: 672 - RNA, 19 nt, Artificial Sequence
  Synthetic
uacugcaccggaccaaacg

SEQ ID NO: 673 - DNA, 36 bp, Artificial Sequence
  Synthetic
tggaggtgctcaaagagatggaagccaatgcccgga

SEQ ID NO: 674 - DNA, 34 bp, Artificial Sequence
  Synthetic
agagatggaagccaatgcccggaaagctggctgc

SEQ ID NO: 675 - DNA, 37 bp, Artificial Sequence
  Synthetic
  misc_feature (1)..(37): "n" represents any nucleotide
nnggaggtgctcaaagagatggaagccaatgcccgga

SEQ ID NO: 676 - DNA, 36 bp, Artificial Sequence
  Synthetic
  misc_feature (1)..(36): "n" represents any nucleotide
tngaggtgctcaaagagatggaagccaatgcccgga

SEQ ID NO: 677 - DNA, 36 bp, Artificial Sequence
  Synthetic
  misc_feature (1)..(36): "n" represents any nucleotide
tgnaggtgctcaaagagatggaagccaatgcccgga

SEQ ID NO: 678 - DNA, 36 bp, Artificial Sequence
  Synthetic
  misc_feature (1)..(36): "n" represents any nucleotide
tggnggtgctcaaagagatggaagccaatgcccgga

SEQ ID NO: 679 - DNA, 36 bp, Artificial Sequence
  Synthetic
  misc_feature (1)..(36): "n" represents any nucleotide
tggnggtgctcaaagagatggaagccaatgcccggn

SEQ ID NO: 680 - DNA, 34 bp, Artificial Sequence
  Synthetic
  misc_feature (1)..(34): "n" represents any nucleotide
ngagatggaagccaatgcccggaaagctggctgc

SEQ ID NO: 681 - DNA, 34 bp, Artificial Sequence
  Synthetic
  misc_feature (1)..(34): "n" represents any nucleotide
anagatggaagccaatgcccggaaagctggctgc

SEQ ID NO: 682 - DNA, 34 bp, Artificial Sequence
  Synthetic
  misc_feature (1)..(34): "n" represents any nucleotide
agngatggaagccaatgcccggaaagctggctgc

SEQ ID NO: 683 - DNA, 34 bp, Artificial Sequence
  Synthetic
  misc_feature (1)..(34): "n" represents any nucleotide
aganatggaagccaatgcccggaaagctggctgc

SEQ ID NO: 684 - DNA, 34 bp, Artificial Sequence
  Synthetic
  misc_feature (1)..(34): "n" represents any nucleotide
agagatggaagccaatgcccggaaagctggctgn

SEQ ID NO: 685 - DNA, 36 bp, Artificial Sequence
  Synthetic
  misc_feature (1)..(36): "n" represents any nucleotide
nngaggtgctcaaagagatggaagccaatgcccgga

SEQ ID NO: 686 - DNA, 36 bp, Artificial Sequence
  Synthetic
  misc_feature (1)..(36): "n" represents any nucleotide
ngnaggtgctcaaagagatggaagccaatgcccgga

SEQ ID NO: 687 - DNA, 36 bp, Artificial Sequence
  Synthetic
  misc_feature (1)..(36): "n" represents any nucleotide
nggnggtgctcaaagagatggaagccaatgcccgga

SEQ ID NO: 688 - DNA, 36 bp, Artificial Sequence
  Synthetic
  misc_feature (1)..(36): "n" represents any nucleotide
nggangtgctcaaagagatggaagccaatgcccgga

SEQ ID NO: 689 - DNA, 36 bp, Artificial Sequence
  Synthetic
  misc_feature (1)..(36): "n" represents any nucleotide
tggaggtgctcaaagagatggaagccaatgcccgnn

SEQ ID NO: 690 - DNA, 34 bp, Artificial Sequence
  Synthetic
  misc_feature (1)..(34): "n" represents any nucleotide
nnagatggaagccaatgcccggaaagctggctgc

SEQ ID NO: 691 - DNA, 34 bp, Artificial Sequence
  Synthetic
  misc_feature (1)..(34): "n" represents any nucleotide
ngngatggaagccaatgcccggaaagctggctgc

SEQ ID NO: 692 - DNA, 34 bp, Artificial Sequence
  Synthetic
  misc_feature (1)..(34): "n" represents any nucleotide
nganatggaagccaatgcccggaaagctggctgc

SEQ ID NO: 693 - DNA, 34 bp, Artificial Sequence
  Synthetic
  misc_feature (1)..(34): "n" represents any nucleotide
ngagntggaagccaatgcccggaaagctggctgc

SEQ ID NO: 694 - DNA, 34 bp, Artificial Sequence
  Synthetic
  misc_feature (1)..(34): "n" represents any nucleotide
agagatggaagccaatgcccggaaagctggctnn

SEQ ID NO: 695 - RNA, 55 nt, Artificial Sequence
  Synthetic
aaugcagaguagaggccgcaggauaguuuagaacauucuauggaaagagauucca

SEQ ID NO: 696 - DNA, 48 bp, Artificial Sequence
  Synthetic
cgagcctcacacgtgctgcttgactacagggagacgtgcgctgctccc

SEQ ID NO: 697 - protein, 16 aa, Artificial Sequence
  Synthetic
RASHVLLDYRETCAAP

SEQ ID NO: 698 - DNA, 48 bp, Artificial Sequence
  Synthetic
cgagcctcacacgtggaaagggactacagggagacgtgcgctgctccc

SEQ ID NO: 699 - DNA, 48 bp, Artificial Sequence
  Synthetic
cgagcctcacacaagacccttgactacagggagacgtgcgctgctccc

SEQ ID NO: 700 - RNA, 45 nt, Artificial Sequence
  Synthetic
auugaaugcagaguagaggccgcaggauaguuuagaacauucuau

SEQ ID NO: 701 - RNA, 66 nt, Artificial Sequence
  Synthetic
ucuaaaccauccugcggccucuacucugcaguuguggaagguccaguuuugggggcuauuacaaca

SEQ ID NO: 702 - RNA, 104 nt, Artificial Sequence
  Synthetic
gccgaaugugucaguauguaauugaaugcagaguagaggccgcaggauaguuuagaacauucuauggaaagagauuccaguuccaggaaccugguacauacgug

SEQ ID NO: 703 - RNA, 24 nt, Artificial Sequence
  Synthetic
  misc_feature (1)..(24): "n" represents any nucleotide
nnnngacuacagnucccgaacuag

SEQ ID NO: 704 - RNA, 48 nt, Artificial Sequence
  Synthetic
gacuaauaggaugaggaaaaucagcacaagcaaaaccauaaauacuau

SEQ ID NO: 705 - RNA, 65 nt, Artificial Sequence
  Synthetic
ucgucuaugugcugugcugggcacccuucuuccuggugcagcuguaggccgcgugggacccggag

SEQ ID NO: 706 - RNA, 50 nt, Artificial Sequence
  Synthetic
acgacacgacccgugggaagaaggaccacgucgacacccggcgcacccug

SEQ ID NO: 707 - RNA, 50 nt, Artificial Sequence
  Synthetic
gacacgacccgugggaagaaggaccacgucgacacccggcgcacccuggg

SEQ ID NO: 708 - RNA, 50 nt, Artificial Sequence
  Synthetic
cacgacccgugggaagaaggaccacgucgacacccggcgcacccugggcc

SEQ ID NO: 709 - RNA, 64 nt, Artificial Sequence
  Synthetic
ccucaacuuccugcucuggguccuggaggccacacgaucgccuaggaugucaucacccugaugg

SEQ ID NO: 710 - RNA, 50 nt, Artificial Sequence
  Synthetic
aggacgagacccgaggaccuccggugugcuagcggacccuacaguagugg

SEQ ID NO: 711 - RNA, 50 nt, Artificial Sequence
  Synthetic
gacgagacccgaggaccuccggugugcuagcggacccuacaguaguggga

SEQ ID NO: 712 - RNA, 50 nt, Artificial Sequence
  Synthetic
gagacccgaggaccuccggugugcuagcggacccuacaguagugggacua

SEQ ID NO: 713 - RNA, 99 nt, Artificial Sequence
  Synthetic
cccaggugcgggagagaggccugcugaaaaugacugaauauaaacuugugguaguuggagcugguggcguaggcaagagugccuugacgauacagcuaa

SEQ ID NO: 714 - RNA, 50 nt, Artificial Sequence; identical to SEQ ID NO: 706
  Synthetic

SEQ ID NO: 715 - RNA, 50 nt, Artificial Sequence; identical to SEQ ID NO: 707
  Synthetic

SEQ ID NO: 716 - RNA, 50 nt, Artificial Sequence; identical to SEQ ID NO: 708
  Synthetic

SEQ ID NO: 717 - RNA, 65 nt, Artificial Sequence
  Synthetic
ccucaacuuccugcucugggcuccuggaggccacacgaucgccuaggaugucaucacccugaugg

SEQ ID NO: 718 - RNA, 50 nt, Artificial Sequence; identical to SEQ ID NO: 710
  Synthetic

SEQ ID NO: 719 - RNA, 50 nt, Artificial Sequence; identical to SEQ ID NO: 711
  Synthetic

SEQ ID NO: 720 - RNA, 50 nt, Artificial Sequence; identical to SEQ ID NO: 712
  Synthetic

SEQ ID NO: 721 - DNA, 44 bp, Artificial Sequence
  Synthetic
tatgtaattgaatgcagagtagaggccgcaggatagtttagaac

SEQ ID NO: 722 - RNA, 39 nt, Artificial Sequence
  Synthetic
  misc_feature (1)..(39): "n" represents any ribonucleotide
augnnuugccaccgacgacaccgugaggauaaauunnnn

SEQ ID NO: 723 - RNA, 36 nt, Artificial Sequence
  Synthetic
uggaggugcucaaagagauggaagccaaugcccgga

SEQ ID NO: 724 - RNA, 36 nt, Artificial Sequence
  Synthetic
  misc_feature (1)..(36): "n" represents any ribonucleotide
nggaggugcucaaagagauggaagccaaugcccgga

SEQ ID NO: 725 - RNA, 36 nt, Artificial Sequence
  Synthetic
  misc_feature (1)..(36): "n" represents any ribonucleotide
ungaggugcucaaagagauggaagccaaugcccgga

SEQ ID NO: 726 - RNA, 36 nt, Artificial Sequence
  Synthetic
  misc_feature (1)..(36): "n" represents any ribonucleotide
ugnaggugcucaaagagauggaagccaaugcccgga

SEQ ID NO: 727 - RNA, 36 nt, Artificial Sequence
  Synthetic
  misc_feature (1)..(36): "n" represents any ribonucleotide
uggnggugcucaaagagauggaagccaaugcccgga

SEQ ID NO: 728 - RNA, 36 nt, Artificial Sequence
  Synthetic
  misc_feature (1)..(36): "n" represents any ribonucleotide
uggaggugcucaaagagnuggaagccaaugcccgga

SEQ ID NO: 729 - RNA, 36 nt, Artificial Sequence
  Synthetic
  misc_feature (1)..(36): "n" represents any ribonucleotide
uggaggugcucaaagagauggaagccaaugcccggn

SEQ ID NO: 730 - RNA, 36 nt, Artificial Sequence
  Synthetic
  misc_feature (1)..(36): "n" represents any ribonucleotide
nngaggugcucaaagagauggaagccaaugcccgga

SEQ ID NO: 731 - RNA, 36 nt, Artificial Sequence
  Synthetic
  misc_feature (1)..(36): "n" represents any ribonucleotide
ngnaggugcucaaagagauggaagccaaugcccgga

SEQ ID NO: 732 - RNA, 36 nt, Artificial Sequence
  Synthetic
  misc_feature (1)..(36): "n" represents any ribonucleotide
nggnggugcucaaagagauggaagccaaugcccgga

SEQ ID NO: 733 - RNA, 36 nt, Artificial Sequence
  Synthetic
  misc_feature (1)..(36): "n" represents any ribonucleotide
nggangugcucaaagagauggaagccaaugcccgga

SEQ ID NO: 734 - RNA, 36 nt, Artificial Sequence
  Synthetic
  misc_feature (1)..(36): "n" represents any ribonucleotide
uggaggugcucaangagnuggaagccaaugcccgga

SEQ ID NO: 735 - RNA, 36 nt, Artificial Sequence
  Synthetic
  misc_feature (1)..(36): "n" represents any ribonucleotide
uggaggugcucaaagagauggaagccaaugcccgnn

SEQ ID NO: 736 - RNA, 34 nt, Artificial Sequence
  Synthetic
agagauggaagccaaugcccggaaagcuggcugc

SEQ ID NO: 737 - RNA, 106 nt, Cypridinia luciferase
gccgaaugugucaguauguaauugaaugcagaguagaggccgcaggauaguuuagaacauucuauggaaagagauuccaguuccaggaaccugguacauacguguu

SEQ ID NO: 738 - RNA, 30 nt, Artificial Sequence
  Synthetic
uuaacuuacgucucaucuccggcguccuac

SEQ ID NO: 739 - RNA, 30 nt, Artificial Sequence
  Synthetic
cuuacgucucaucuccggcguccuaccaaa

SEQ ID NO: 740 - RNA, 30 nt, Artificial Sequence
  Synthetic
cgucucaucuccggcguccuaccaaaucuu

SEQ ID NO: 741 - RNA, 30 nt, Artificial Sequence
  Synthetic
ucaucuccggcguccuaccaaaucuuguaa

SEQ ID NO: 742 - RNA, 30 nt, Artificial Sequence
  Synthetic
cuccggcguccuaccaaaucuuguaagaua

SEQ ID NO: 743 - RNA, 30 nt, Artificial Sequence
  Synthetic
ggcguccuaccaaaucuuguaagauaccuu

SEQ ID NO: 744 - RNA, 30 nt, Artificial Sequence
  Synthetic
uccuaccaaaucuuguaagauaccuuucuc

SEQ ID NO: 745 - RNA, 30 nt, Artificial Sequence
  Synthetic
accaaaucuuguaagauaccuuucucuaag

SEQ ID NO: 746 - RNA, 104 nt, Homo sapiens
uuggucucuucggaaagacuguuccaaaaacaguggauaauuuuguggccuuagcuacaggagagaaaggauuuggcuacaaaaacagcaaauuccaucgugua

SEQ ID NO: 747 - RNA, 50 nt, Artificial Sequence
  Synthetic
cagagaagccuuucugacaagguuuuugucaccuauuaaaacaccggaac

SEQ ID NO: 748 - RNA, 50 nt, Artificial Sequence
  Synthetic
ccuuucugacaagguuuuugucaccuauuaaaacaccggaaccgaugucc

SEQ ID NO: 749 - RNA, 50 nt, Artificial Sequence
  Synthetic
acaagguuuuugucaccuauuaaaacaccggaaccgauguccucucuuuc

SEQ ID NO: 750 - RNA, 50 nt, Artificial Sequence
  Synthetic
uuugucaccuauuaaaacaccggaaccgauguccucucuuuccuaaaccg

SEQ ID NO: 751 - RNA, 50 nt, Artificial Sequence
  Synthetic
cuauuaaaacaccggaaccgauguccucucuuuccuaaaccgauguuuuu

SEQ ID NO: 752 - RNA, 50 nt, Artificial Sequence
  Synthetic
acaccggaaccgauguccucucuuuccuaaaccgauguuuuugucguuua

SEQ ID NO: 753 - RNA, 50 nt, Artificial Sequence
  Synthetic
accgauguccucucuuuccuaaaccgauguuuuugucguuuaagguagca

SEQ ID NO: 754 - RNA, 56 nt, Artificial Sequence
  Synthetic
aguauguaauugaaugcagaguagaggccgcaggauaguuuagaacauucuaugga

SEQ ID NO: 755 - RNA, 50 nt, Artificial Sequence
  Synthetic
  misc_feature (1)..(50): "n" represents any nucleotide
auagaauguucuaaacnauccugcggccucuacucugcauucaauuacau

SEQ ID NO: 756 - RNA, 59 nt, Artificial Sequence
  Synthetic
auguaauugaaugcagaguagaggccgcaggauaguuuagaacauucuauggaaagaga

SEQ ID NO: 757 - RNA, 83 nt, Artificial Sequence
  Synthetic
ucuuuccauaggcccugaaaaagggccuguucuaaaccauccugcggccucuacucggcccugaaaaagggccauucaauuac

SEQ ID NO: 758 - RNA, 21 nt, Artificial Sequence
  Synthetic
ggccgcaggauaguuuagaac

SEQ ID NO: 759 - RNA, 55 nt, Artificial Sequence
  Synthetic
aaauguuguuauaguaucccaccucuaaaccauccugcggggcccuagggcccuu

SEQ ID NO: 760 - RNA, 26 nt, Artificial Sequence
  Synthetic
accgguggaauaguauaacaauaugc

SEQ ID NO: 761 - protein, 356 aa, Homo sapiens
MGSGGGGSEGAPKKKRKVGSSLGTGNRCVKGDSLSLKGETVNDCHAEIISRRGFIRFLYSELMKYNSQTAKDSIFEPAKGGEKLQIKKTVSFHLYISTAPCGDGALFDKSCSDRAMESTESRHYPVFENPKQGKLRTKVENGQGTIPVESSDIVPTWDGIRLGERLRTMSCSDKILRWNVLGLQGALLTHFLQPIYLKSVTLGYLFSQGHLTRAICCRVTRDGSAFEDGLRHPFIVNHPKVGRVSIYDSKRQSGKTKETSVNWCLADGYDLEILDGTRGTVDGPRNELSRVSKKNIFLLFKKLCSFRYRRDLLRLSYGEAKKAARDYETAKNYFKKGLKDMGYGNWISKPQEEKNF

SEQ ID NO: 762 - protein, 668 aa, Fusobacterium necrophorum subsp. funduliforme; identical to SEQ ID NO: 158

SEQ ID NO: 763 - protein, 796 aa, Tissierella sp.
MEKDKKGEKIDISQEMIEEDLRKILILFSRLRHSMVHYDYEFYQALYSGKDFVISDKNNLENRMISQLLDLNIFKELSKVKLIKDKAISNYLDKNTTIHVLGQDIKAIRLLDIYRDICGSKNGFNKFINTMITISGEEDREYKEKVIEHFNKKMENLSTYLEKLEKQDNAKRNNKRVYNLLKQKLIEQQKLKEWFGGPYVYDIHSSKRYKELYIERKKLVDRHSKLFEEGLDEKNKKELTKINDELSKLNSEMKEMTKLNSKYRLQYKLQLAFGFILEEFDLNIDTFINNFDKDKDLIISNFMKKRDIYLNRVLDRGDNRLKNIIKEYKFRDTEDIFCNDRDNNLVKLYILMYILLPVEIRGDFLGFVKKNYYDMKHVDFIDKKDKEDKDTFFHDLRLFEKNIRKLEITDYSLSSGFLSKEHKVDIEKKINDFINRNGAMKLPEDITIEEFNKSLILPIMKNYQINFKLLNDIEISALFKIAKDRSITFKQAIDEIKNEDIKKNSKKNDKNNHKDKNINFTQLMKRALHEKIPYKAGMYQIRNNISHIDMEQLYIDPLNSYMNSNKNNITISEQIEKIIDVCVTGGVTGKELNNNIINDYYMKKEKLVFNLKLRKQNDIVSIESQEKNKREEFVFKKYGLDYKDGEINIIEVIQKVNSLQEELRNIKETSKEKLKNKETLFRDISLINGTIRKNINFKIKEMVLDIVRMDEIRHINIHIYYKGENYTRSNIIKFKYAIDGENKKYYLKQHEINDINLELKDKFVTLICNMDKHPNKNKQTINLESNYIQNVKFIIP

SEQ ID NO: 764 - protein, 897 aa, Fusobacterium ulcerans; identical to SEQ ID NO: 160

SEQ ID NO: 765 - protein, 919 aa, Cetobacterium sp. ZOR0034
MEEIKHKKNKSSIIRVIVSNYDMTGIKEIKVLYQKQGGVDTFNLKTIINLESGNLEIISCKPKEREKYRYEFNCKTEINTISITKKDKVLKKEIRKYSLELYFKNEKKDTVVAKVTDLLKAPDKIEGERNHLRKLSSSTERKLLSKTLCKNYSEISKTPIEEIDSIKIYKIKRFLNYRSNFLIYFALINDFLCAGVKEDDINEVWLIQDKEHTAFLENRIEKITDYIFDKLSKDIENKKNQFEKRIKKYKTSLEELKTETLEKNKTFYIDSIKTKITNLENKITELSLYNSKESLKEDLIKIISIFTNLRHSLMHYDYKSFENLFENIENEELKNLLDLNLFKSIRMSDEFKTKNRTNYLDGTESFTIVKKHQNLKKLYTYYNNLCDKKNGFNTFINSFFVTDGIENTDFKNLIILHFEKEMEEYKKSIEYYKIKISNEKNKSKKEKLKEKIDLLQSELINMREHKNLLKQIYFFDIHNSIKYKELYSERKNLIEQYNLQINGVKDVTAINHINTKLLSLKNKMDKITKQNSLYRLKYKLKIAYSFLMIEFDGDVSKFKNNFDPTNLEKRVEYLDKKEEYLNYTAPKNKFNFAKLEEELQKIQSTSEMGADYLNVSPENNLFKFYILTYIMLPVEFKGDFLGFVKNHYYNIKNVDFMDESLLDENEVDSNKLNEKIENLKDSSFFNKIRLFEKNIKKYEIVKYSVSTQENMKEYFKQLNLDIPYLDYKSTDEIGIFNKNMILPIFKYYQNVFKLCNDIEIHALLALANKKQQNLEYAIYCCSKKNSLNYNELLKTFNRKTYQNLSFIRNKIAHLNYKELFSDLFNNELDLNTKVRCLIEFSQNNKFDQIDLGMNFINDYYMKKTRFIFNQRRLRDLNVPSKEKIIDGKRKQQNDSNNELLKKYGLSRTNIKDIFNKAWY

SEQ ID NO: 766 - protein, 1110 aa, Fusobacterium necrophorum; identical to SEQ ID NO: 157

SEQ ID NO: 767 - protein, 1111 aa, Fusobacterium necrophorum; identical to SEQ ID NO: 156

SEQ ID NO: 768 - protein, 1111 aa, Anaerosalibacter massiliensis; identical to SEQ ID NO: 161

SEQ ID NO: 769 - protein, 1111 aa, Fusobacterium necrophorum
MEKFRRQNRNSIIKIIISNYDTKGIKELKVRYRKQAQLDTFIIKTEIVNNDIFIKSIIEKAREKYRYSFLFDGEEKYHFKNKSSVEIVKKDIFSQTPDNMIRNYKITLKISEKNPRVVEAEIEDLMNSTILKDGRRSARREKSVTERKLIEEKVAENYSLLANCPMEEVDSIKIYKIKRFLTYRSNMLLYFASINSFLCEGIKGKENETEEIWHLKDNDVRKEKVKENFKNKLIQSTENYNSSLKNQIEEKEKLLRKESKKGAFYRTIIKKLQQERIKELSEKSLTEDCEKIIKLYSKLRHSLMHYDYQYFENLFENKETPELKDKLDLHLFKSLPLIRKMKLNNKVNYLEDGDTLFVLQKTKKAKTLYQIYDALCEQKNGFNKFINDFFVSDGEENTVFKQIINEKFQSEMEFLGKRISESEEKNPKLKKKFDSMKAHFHNINSEDTKEAYFWDIHSSSNYKTKYNERKNLVNEYTELLGSSKEKKLLREEITQINRKLLKLKQEMEEITKKNSLFRLEYKMKMAFGFLFCEFDGNISRFKDEFDASNQEKIIQYHKNGEKYLTYFLKEEEKEKFNLKKLQETIQKTGKENWLLPQNKNNLFKFYLLTYLLLPYELKGDFLGFVKKHYYDIKNVDFMDENQSSKIIESKEDDFYHKIRLFEKNTKKYEIVKYSIVPDEKLKQYFKDLGIDTKYLILEQKSEVSGEKNKKVSLKNNGMFNKTILLFVFKYYQIAFKLFNDIELYSLFFLREKSGKPFEVFLKELKDKMIGKQLNFGQLLYVIYEVLVKNKDLSEILSERIDYRKDMCFSAEIADLRNFLSHLNYSKFLDNFMKINTNKSDENKEVLIPSIKIQKMIKFIEECNLQSQIDFDFNFVNDFYMRKEKMFFIQLKQIFPDINSTEKQKMNEKEEILRNRYHLTDKKNEQIKDEHEAQSQLYEKILSLQKIYSSDKNNFYGRLKEEKLLFLGKQGKKKLSMEEIKDKIAGDISDLLGILKKEITRDIKDKLTEKFRYCEEKLLNLSFYNHQDKKKEESIRVFLIRDKNSDNFKFESILDDGSNKIFISKNGKEITIQCCDKVLETLMIEKNTLKISSNGKIISLVPHYSYSIDVKY

SEQ ID NO: 770 - protein, 1115 aa, Fusobacterium necrophorum; identical to SEQ ID NO: 155

SEQ ID NO: 771 - protein, 1121 aa, Fusobacterium perfoetens; identical to SEQ ID NO: 159

SEQ ID NO: 772 - protein, 1137 aa, Fusobacterium necrophorum
MEKFRRQNRNSIIKIIISNYDTKGIKELKVRYRKQAQLDTFIIKTEIVNNDIFIKSIIEKAREKYRYSFLFDGEEKYHFKNKSSVEIVKKDIFSQTPDNMIRNYKITLKISEKNPRVVEAEIEDLMNSTILKDGRRSARREKSMTERKLIEEKVAKNYSLLANCPMEEVDSIKIYKIKRFLTYRSNMLLYFASINSFLCEGIKGKDNETEEIWHLKDNDVRKEKVRENFKNKLIQSTENYNSSLKNQIEEKEKLLRKEFKKGAFYRTIIKKLQQERIKELSEKSLTEDCEKIIKLYSKLRHSLMHYDYQYFENLFENKKNDDLMKDLNLDLFKSLPLIRKMKLNNKVNYLEDGDTLFVLQKTKKAKTLYQIYDALCEQKNGFNKFINDFFVSDGEENTVFKQIINEKFQSEMEFLEKRISESEKKNEKLKKKLDSMKAHFRNINSEDTKEAYFWDIHSSRNYKTKYNERKNLVNEYTELLGSSKEKKLLREEITKINRQLLKLKQEMEEITKKNSLFRLEYKMKIAFGFLFCEFDGNISKFKDEFDASNQEKIIQYHKNGEKYLTSFLKEEEKEKFNLEKMQKIIQKTEEEDWLLPETKNNLFKFYLLTYLLLPYELKGDFLGFVKKHYYDIKNVDFIDENQNNIQVSQTVEKQEDYFYHKIRLFEKNTKKYEIVKYSIVPNEKLKQYFEDLGIDIKYLTGSVESGEKWLGENLGIDIKYLTVEQKSEVSEEKNKKVSLKNNGMFNKTILLFVFKYYQIAFKLFNDIELYSLFFLREKSGKPLEIFRKELESKMKDGYLNFGQLLYVVYEVLVKNKDLDKILSKKIDYRKDKSFSPEIAYLRNFLSHLNYSKFLDNFMKINTNKSDENKEVLIPSIKIQKMIQFIEKCNLQNQIDFDFNFVNDFYMRKEKMFFIQLKQIFPDINSTEKQKMNEKEEILRNRYHLTDKKNEQIKDEHEAQSQLYEKILSLQKIYSSDKNNFYGRLKEEKLLFLEKQGKKKLSMEEIKDKIAGDISDLLGILKKEITRDIKDKLTEKFRYCEEKLLNLSFYNHQDKKKEESIRVFLIRDKNSDNFKFESILDDGSNKIFISKNGKEITIQCCDKVLETLIIEKNTLKISSNGKIISLIPHYSYSIDVKY

SEQ ID NO: 773 - protein, 1158 aa, Fusobacterium varium
MENKNKPNRGSIVRIIISNYDMKGIKELKVRYRKQAQLDTFILQTTLDKSNNSILINDFRVKAREKYRYSFTYDGKEKFSVPSNSIIVTKIDNAAPEKSKEIRKYKITLGIDEKCKTGSMITAAIEDLLEDDRVREGIRNPRRKASKTERKLITESICHNYAQITQCPVEEIDAVKIYKVKRFLSYRSNMLLFFALINDFLCKNLKNEKGEKINEIWEMENKGNNKKIDFDENYNILVAQIKEYFTKEIENYNNRIDNIIDKKELLKYSEEKEESEKNKKLEELNKLESQKLKILTDEEIKADVIKIIKIFSDLRHSLMHYEYKYFENLFENKKNEELAELLNLNLFKNLTLLRQMKIENKTNYLEGDEKFNILGKDVRAKNALGHYDLLVEQKNGFNNFINSFFVQDGTENLEFKKFIDENFIKAQKELEEDIKNCKESVKKLEKKLKENPKKSEDLEKKLEKKQKKLKELKKELEKMKQHYKRLNCAYVWDIHSSTVYKKLYNERKNLIEKYNKQLNGLQDKNAITGINAQLLRIKKEMEEITKSNSLFRLKYKMQIAYAFLEMEYEGNIAKFKNEFDCSKTEKIQEWLEKSEEYLNYCMEKEEDGKNYKFHFKEISEIKDTHNEEWLENTSENNLFKFYILTYLLLPMEFKGDFLGVVKKHYYDIKNVDFTDESEKELSQEQIDKMIGDSFFHKIRLFEKNTKRYEIIKYSILTSDEIKKYFELLELKVPYLEYKGIDEIGIFNKNIILPIFKYYQIIFRLYNDLEIHGLFNVSFDINKILSDLKSYGNENINFREFLYVIKQNNNSSTEEEYQKIWEKLESKYLKEPLLTPEKKEINKKTEKELKKLDGISFLRNKISHLEYEKIIEGVLKTAVNGENKKTSETNADKVFLNEKIKKIINFIKENELDKIELGFNFINDFFMKKEQFMFGQIKQVKEGNSDSITTERKRKEENNKRLKITYGLNYNNLSKIYEFSNTLREIVNSPLFLKDSTLLKKVDLSKVMLKEKPICSLQYENNTKLEDDIKRILLKDSSDIMGIYKAEVVKKLKEKLVLIFKYDEEKKIYVTVYDTSKAVPENISKEILVKRNNSKEEYFFEDNKKKYTTQYYTLEITKENELKVIPAKKLEGKEFKTEKKEENKLMLNNHYCFNVKIIY

SEQ ID NO: 774 - protein, 206 aa, Homo sapiens
MSPAPVIPSNTDYPGPHHFEVTFQQSSTAKSATWTYSPLLKKLYCQIAKTCPIQIKVSTPPPPGTAIRAMPVYKKAEHVTDVVKRCPNHELGRDFNEGQSAPASHLIRVEGNNLSQYVDDPVTGRQSVVVPYEPPQVGTEFTTILYNFMCNSSCVGGMNRRPILIIITLEMRDGQVLGRRSFEGRICACPGRDRKADEDHYREQQA

SEQ ID NO: 775 - protein, 206 aa, Homo sapiens
LSPSPAIPSNTDYPGPHSFDVSFQQSSTAKSATWTYSTELKKLYCQIAKTCPIQIKVMTPPPQGAVIRAMPVYKKAEHVTEVVKRCPNHELSREFNEGQIAPPSHLIRVEGNSHAQYVEDPITGRQSVLVPYEPPQVGTEFTTVLYNFMCNSSCVGGMNRRPILIIVTLETRDGQVLGRRCFEARICACPGRDRKADEDSIRKQQV

SEQ ID NO: 776 - protein, 204 aa, Homo sapiens
WPLSSSVPSQKTYQGSYGFRLGFLHSGTAKSVTCTYSPALNKMFCCLAKTCPVQLWVDSTPPPGTRVRAMAIYKQSQHMTEVVRRCPHHERCSDSDGLAPPQHLIRVEGNLRVEYLDDRNTFRHSVVVPYEPPEVGSDCTTIHYNYMCNSSCMGGMNRRPILTIITLEDSSGNLLGRNSFEVRVCACPGRDRRTEEENLRKKGE

SEQ ID NO: 777 - RNA, 19 nt, Artificial Sequence
  Synthetic oligonucleotide
uuccccacauugacguuca

SEQ ID NO: 778 - RNA, 20 nt, Artificial Sequence
  Synthetic oligonucleotide
ugaacgaccaauguggggaa

SEQ ID NO: 779 - RNA, 24 nt, Cypridina luciferase
  misc_feature (1)..(4): n = any nucleotide
nnnngacuacagucccgaaacuag

SEQ ID NO: 780 - RNA, 19 nt, Homo sapiens
uuccccacauugacguuca

SEQ ID NO: 781 - RNA, 20 nt, Homo sapiens
ugaacggccaauguggggaa

SEQ ID NO: 782 - DNA, 44 bp, Artificial Sequence; identical to SEQ ID NO: 721
  Synthetic Oligonucleotide

SEQ ID NO: 783 - DNA, 36 bp, Artificial Sequence
  Synthetic Oligonucleotide
tatgtaattgaatgcagccgcaggatggtttggagc

SEQ ID NO: 784 - DNA, 37 bp, Artificial Sequence
  Synthetic Oligonucleotide
tatgtaattgaatgcagaccgcaggatagtttagaac

SEQ ID NO: 785 - DNA, 38 bp, Artificial Sequence
  Synthetic Oligonucleotide
tatgtaattgaatgcagagccgcaggatggtttggaac

SEQ ID NO: 786 - DNA, 38 bp, Artificial Sequence
  Synthetic Oligonucleotide
tatgtaattgaatgcagagtggaaggatagtttagaac

SEQ ID NO: 787 - DNA, 37 bp, Artificial Sequence
  Synthetic Oligonucleotide
tatgtaattgaatgcagagtgaaggatggtttagaac

SEQ ID NO: 788 - DNA, 38 bp, Artificial Sequence
  Synthetic Oligonucleotide
tgtgtaattgaatgcagagtggaaggatggtttagaac

SEQ ID NO: 789 - DNA, 38 bp, Artificial Sequence
  Synthetic Oligonucleotide
tatgtaattgaatgcagagtggaagggtggtttggaac

SEQ ID NO: 790 - DNA, 38 bp, Artificial Sequence
  Synthetic Oligonucleotide
tatgtaattgaatgcagagtagaaggatggtttagaac

SEQ ID NO: 791 - DNA, 39 bp, Artificial Sequence
  Synthetic Oligonucleotide
tatgtaattgaatgcagagtagagaggatggtttggaac

SEQ ID NO: 792 - DNA, 39 bp, Artificial Sequence
  Synthetic Oligonucleotide
tgtgtaattgaatgcagagtggagaggatggtttagaac

SEQ ID NO: 793 - DNA, 39 bp, Artificial Sequence
  Synthetic Oligonucleotide
tatgtaattgaatgcagagtggagaggatggtttagagc

SEQ ID NO: 794 - DNA, 39 bp, Artificial Sequence
  Synthetic Oligonucleotide
tatgtaattgaatgcagagtagagaggatggtttagaac

SEQ ID NO: 795 - DNA, 39 bp, Artificial Sequence
  Synthetic Oligonucleotide
tatgtaattgaatgcagagtggaggccgcggtttggaac

SEQ ID NO: 796 - DNA, 39 bp, Artificial Sequence
  Synthetic Oligonucleotide
tatgtaattgaatgcagagtagacaccgcggtttggagc

SEQ ID NO: 797 - DNA, 39 bp, Artificial Sequence
  Synthetic Oligonucleotide
tatgtaattgaatgcagagtggaggccgcagtttggagc

SEQ ID NO: 798 - DNA, 39 bp, Artificial Sequence
  Synthetic Oligonucleotide
tatgtaattgaatgcagagtagaggccgcaggttggaac

SEQ ID NO: 799 - DNA, 39 bp, Artificial Sequence
  Synthetic Oligonucleotide
tgtgtaattgaatgcagagtggaggccgcaggttagaac

SEQ ID NO: 800 - DNA, 39 bp, Artificial Sequence
  Synthetic Oligonucleotide
tatgtaattgaatgcagagtggaggccgcaggttggaac

SEQ ID NO: 801 - DNA, 39 bp, Artificial Sequence; identical to SEQ ID NO: 800
  Synthetic Oligonucleotide

SEQ ID NO: 802 - DNA, 38 bp, Artificial Sequence
  Synthetic Oligonucleotide
tatgtaattgaatgcagagtacaggccgcaggtggagc

SEQ ID NO: 803 - DNA, 39 bp, Artificial Sequence
  Synthetic Oligonucleotide
tatgtaattgaatgcagagtccgcaggatggtttagaac

SEQ ID NO: 804 - DNA, 38 bp, Artificial Sequence
  Synthetic Oligonucleotide
tatgtaattgaatgcagagtagcaggatagtttagaac

SEQ ID NO: 805 - DNA, 38 bp, Artificial Sequence
  Synthetic Oligonucleotide
tatgtaattgaatgcagagtagaaggatagtttagaac

SEQ ID NO: 806 - DNA, 39 bp, Artificial Sequence
  Synthetic Oligonucleotide
tatgtaattgaatgcagagtagagaggatagtttagaac

SEQ ID NO: 807 - DNA, 39 bp, Artificial Sequence; identical to SEQ ID NO: 794
  Synthetic Oligonucleotide

SEQ ID NO: 808 - DNA, 39 bp, Artificial Sequence; identical to SEQ ID NO: 794
  Synthetic Oligonucleotide

SEQ ID NO: 809 - DNA, 39 bp, Artificial Sequence; identical to SEQ ID NO: 806
  Synthetic Oligonucleotide

SEQ ID NO: 810 - DNA, 38 bp, Artificial Sequence
  Synthetic Oligonucleotide
tatgtaattgaatgcagagtagaggcatggtttagaac

SEQ ID NO: 811 - DNA, 39 bp, Artificial Sequence
  Synthetic Oligonucleotide
tatgtaattgaatgcagagtagaggccatagtttagaac

SEQ ID NO: 812 - DNA, 39 bp, Artificial Sequence
  Synthetic Oligonucleotide
tatgtaattgaatgcagagtagaggccatgctttagaac

SEQ ID NO: 813 - DNA, 38 bp, Artificial Sequence
  Synthetic Oligonucleotide
tatgtaattgaatgcagagtagaggcctagtttagaac

SEQ ID NO: 814 - DNA, 38 bp, Artificial Sequence
  Synthetic Oligonucleotide
tatgtaattgaatgcagagtagaggcctggtttagaac

SEQ ID NO: 815 - DNA, 38 bp, Artificial Sequence
  Synthetic Oligonucleotide
tagtaattgaatgcagagtagaggccgcagtttagaac

SEQ ID NO: 816 - DNA, 39 bp, Artificial Sequence
  Synthetic Oligonucleotide
tatgtaattgaatgcagagtagaggccgcaggttagaac

SEQ ID NO: 817 - DNA, 39 bp, Artificial Sequence; identical to SEQ ID NO: 816
  Synthetic Oligonucleotide

SEQ ID NO: 818 - DNA, 37 bp, Artificial Sequence
  Synthetic Oligonucleotide
taattgaatgcagagtagaggccgcaggatggtttag

SEQ ID NO: 819 - DNA, 37 bp, Artificial Sequence
  Synthetic Oligonucleotide
attgaatgcagagtagaggccgcaggatggtttagaa

SEQ ID NO: 820 - RNA, 104 nt, C luciferase
uguugccgaaugugucaguauguaauugaaugcagaguagaggccgcaggauaguuuagaacauucuauggaaagagauuccaguuccaggaaccugguacaua

SEQ ID NO: 821 - RNA, 50 nt, Artificial Sequence
  Synthetic Oligonucleotide
cauccugcggccucuacucugcauucaauuacauacugacacauucggca

SEQ ID NO: 822 - RNA, 50 nt, Artificial Sequence
  Synthetic Oligonucleotide
uucuaaaccauccugcggccucuacucugcauucaauuacauacugacac

SEQ ID NO: 823 - RNA, 50 nt, Artificial Sequence
  Synthetic Oligonucleotide
auagaauguucuaaaccauccugcggccucuacucugcauucaauuacau

SEQ ID NO: 824 - RNA, 50 nt, Artificial Sequence
  Synthetic Oligonucleotide
cucuuuccauagaauguucuaaaccauccugcggccucuacucugcauuc

SEQ ID NO: 825 - RNA, 50 nt, Artificial Sequence
  Synthetic Oligonucleotide
acuggaaucucuuuccauagaauguucuaaaccauccugcggccucuacu

SEQ ID NO: 826 - RNA, 50 nt, Artificial Sequence
  Synthetic Oligonucleotide
uuccuggaacuggaaucucuuuccauagaauguucuaaaccauccugcgg

SEQ ID NO: 827 - RNA, 50 nt, Artificial Sequence
  Synthetic Oligonucleotide
guaccagguuccuggaacuggaaucucuuuccauagaauguucuaaacca

SEQ ID NO: 828 - protein, 9 aa, Artificial Sequence
  Synthetic Peptide
CVRWAGTLW

SEQ ID NO: 829 - protein, 18 aa, Artificial Sequence
  Synthetic Peptide
CARGISGLLTDKSALHMW

SEQ ID NO: 830 - protein, 11 aa, Artificial Sequence
  Synthetic Peptide
CARDPSGFDIW

SEQ ID NO: 831 - protein, 16 aa, Artificial Sequence
  Synthetic Peptide
CVKGVGRDGYNPIDYW

SEQ ID NO: 832 - protein, 15 aa, Artificial Sequence
  Synthetic Peptide
CVRHGNYLFLPFDSW

SEQ ID NO: 833 - protein, 20 aa, Artificial Sequence
  Synthetic Peptide
CMSEIDAKSGSENTEYLHHW

SEQ ID NO: 834 - protein, 18 aa, Artificial Sequence
  Synthetic Peptide
CARLTYYYDSSGNPDYYG

SEQ ID NO: 835 - protein, 8 aa, Artificial Sequence
  Synthetic Peptide
CARNMTFW

SEQ ID NO: 836 - protein, 13 aa, Artificial Sequence
  Synthetic Peptide
CATSGVVVATPHW

SEQ ID NO: 837 - protein, 16 aa, Artificial Sequence
  Synthetic Peptide
CARGGSSRWSFYYYYG

SEQ ID NO: 838 - protein, 27 aa, Artificial Sequence
  Synthetic Peptide
CVKAQSPQTAWGPQGEPGTSGHTDEGR

SEQ ID NO: 839 - protein, 18 aa, Artificial Sequence
  Synthetic Peptide
CVRRPRSRIIKLLMGDEA

SEQ ID NO: 840 - protein, 9 aa, Artificial Sequence [sequence omitted]

SEQ ID NO: 841 - protein, 16 aa, Artificial Sequence
  Synthetic Peptide
CVLYLTPVLSGLTYHW

SEQ ID NO: 842 - protein, 18 aa, Artificial Sequence
  Synthetic Peptide
CARISLIRETITFPPDFW

SEQ ID NO: 843 - protein, 20 aa, Artificial Sequence
  Synthetic Peptide
CARGNIVATITAVGYYMDVW

SEQ ID NO: 844 - protein, 19 aa, Artificial Sequence
  Synthetic Peptide
CARTMSTVVTPGPAWFDPW

SEQ ID NO: 845 - protein, 15 aa, Artificial Sequence
  Synthetic Peptide
CVRHGNYLFLPFDSW

SEQ ID NO: 846 - protein, 17 aa, Artificial Sequence
  Synthetic Peptide
CAGGYGDSSSSPQYYYG

SEQ ID NO: 847 - protein, 14 aa, Artificial Sequence
  Synthetic Peptide
CVRGKSGVASFDYW

SEQ ID NO: 848 - protein, 24 aa, Artificial Sequence
  Synthetic Peptide
CARAGDYDLLTGSPGYYYYGMDVW

SEQ ID NO: 849 - protein, 17 aa, Artificial Sequence
  Synthetic Peptide
CARVGAGGEWELLRHLQ

SEQ ID NO: 850 - protein, 14 aa, Artificial Sequence
  Synthetic Peptide
CARDRDGYSFFDYW

SEQ ID NO: 851 - protein, 12 aa, Artificial Sequence
  Synthetic Peptide
CAKDWGGEEDYW

SEQ ID NO: 852 - protein, 12 aa, Artificial Sequence
  Synthetic Peptide
CVSGFSTGFSQW

SEQ ID NO: 853 - protein, 15 aa, Artificial Sequence
  Synthetic Peptide
CARLGLLTPKYFDNW

SEQ ID NO: 854 - protein, 14 aa, Artificial Sequence
  Synthetic Peptide
CASLPAVITRGDYW

SEQ ID NO: 855 - protein, 15 aa, Artificial Sequence
  Synthetic Peptide
GGGGSGGGGSGGGGS

1. An engineered, non-naturally occurring system suitable for modifying post-translational modification sites on a protein encoded by a target RNA, comprising:
a. a catalytically inactive (dead) Cas13 protein, or a nucleotide sequence encoding said dead Cas13;
b. a nucleotide deaminase protein or catalytic domain thereof, or a nucleotide sequence encoding said nucleotide deaminase protein or catalytic domain thereof; and
c. a guide molecule comprising a guide sequence designed to have a degree of complementarity with a target sequence at one or more codons that comprises an adenine or cytidine and encodes an amino acid that is post-translationally modified;
wherein said nucleotide deaminase or catalytic domain thereof is covalently or non-covalently linked to said dead Cas13 protein or said guide molecule, or is adapted to link thereto after delivery.

2. The system of claim 1, wherein said guide sequence comprises a non-pairing nucleotide at a position corresponding to said adenosine or cytidine resulting in a mismatch in an RNA duplex formed.

3. The system of claim 1, wherein the system comprises a particle delivery system comprising a ribonucleoprotein complex comprising (a), (b), and (c) encapsulated within or otherwise attached to a delivery particle, the delivery particle further optionally comprising a tissue-specific, cell-specific, and/or cell compartment-specific targeting molecule.

4. The system of claim 1, wherein the system comprises a vector system comprising one or more vectors comprising:
i) a first regulatory element operably linked to a nucleotide sequence encoding said guide molecule which comprises said guide sequence;
ii) a second regulatory element operably linked to the nucleotide sequence encoding said dead Cas13 protein; and
iii) a nucleotide sequence encoding the nucleotide deaminase protein or catalytic domain thereof which is under control of said first or second regulatory element or operably linked to a third regulatory element;
wherein if said nucleotide sequence encoding the nucleotide deaminase protein or catalytic domain thereof is operably linked to the third regulatory element, said nucleotide deaminase protein or catalytic domain thereof is adapted to link to said guide molecule or said Cas13 protein after expression; and
wherein components (i), (ii) and (iii) are located on the same or different vectors of the system, optionally wherein said first, second, and/or third regulatory element is an inducible promoter.

5. The system of claim 1, wherein the nucleotide deaminase is an adenosine deaminase or a cytidine deaminase.

6. The system of claim 5, wherein the nucleotide deaminase:
is an adenosine deaminase or catalytic domain thereof;
is an adenosine deaminase protein or catalytic domain thereof that is an RNA-specific adenosine deaminase and/or is a human, cephalopod, or Drosophila adenosine deaminase protein or catalytic domain thereof, preferably ADAR, optionally huADAR, optionally (hu)ADAR1 or (hu)ADAR2, preferably huADAR2 or catalytic domain thereof;
is an adenosine deaminase protein or catalytic domain thereof that has been modified to comprise a mutation at E488, preferably E488Q, of the hADAR2-D amino acid sequence, or a corresponding position in a homologous ADAR protein and/or wherein said adenosine deaminase protein or catalytic domain thereof has been modified to comprise a mutation at T375, preferably T375G of the hADAR2-D amino acid sequence, or a corresponding position in a homologous ADAR protein or wherein said adenosine deaminase protein or catalytic domain thereof has been modified to comprise a mutation at E1008, preferably E10080, of the hADAR1d amino acid sequence, or a corresponding position in a homologous ADAR protein or wherein said adenosine deaminase protein or catalytic domain thereof has been modified to comprise one or more mutation as provided in any of FIGS. 43A-43D, 44, 45, 46A-46B, 47A-47B, or a corresponding mutation in an ADAR homolog or ortholog:
is a cytidine deaminase or a catalytic domain thereof;
is a cytidine deaminase protein or catalytic domain thereof that is a human, rat or lamprey cytidine deaminase protein or catalytic domain thereof;
is a cytidine deaminase protein or catalytic domain thereof is an apolipoprotein B mRNA-editing complex (APOBEC) family deaminase, an activation-induced deaminase (AID), or a cytidine deaminase 1 (CDA1);
is a cytidine deaminase protein or catalytic domain thereof that is an APOBEC1 deaminase comprising one or more mutations corresponding to W90A, W90Y, R118A, H121R, H122R, R126A, R126E, or R132E in rat APOBEC1, or an APOBEC3G deaminase comprising one or more mutations corresponding to W285A, W285Y, R313A, D316R, D317R, R320A, R320E, or R326E in human APOBEC3G;
is delivered together with a uracil glycosylase inhibitor (UGI), where said UGI is covalently linked to said cytidine deaminase protein or catalytic domain thereof and/or said catalytically inactive Cas13 protein;
is fused to N- or C-terminus of said dead Cas13 protein, optionally by a linker, preferably where said linker is (GGGGS)3-11, GSG5 or LEPGEKPYKCPECGKSFSQSGALTRHQRTHTR, or wherein said linker is an XTEN linker;
is linked to an adaptor protein and said guide molecule or said dead Cas13 protein comprises an aptamer sequence capable of binding to said adaptor protein, preferably wherein said adaptor protein is selected from MS2, PP7, Qβ, F2, GA, fr, JP501, M12, R17, BZ13, JP34, JP500, KU1, M11, MX1, TW18, VK, SP, FI, ID2, NL95, TW19, AP205, ϕCb5, ϕCb8r, ϕCb12r, ϕCb23r, 7s, and PRR1; or
is inserted into an internal loop of said dead Cas13 protein.

7. (canceled)

8. (canceled)

9. (canceled)

10. (canceled)

11. (canceled)

12. (canceled)

13. (canceled)

14. The system of claim 1, wherein said Cas13 protein is Cas13a, Cas13b, or Cas13c, preferably wherein said Cas13 a Cas13 listed in any of Tables 1, 2, 3, 4, or 6 or is from a bacterial species listed in any of Tables 1, 2, 3, 4, or 6, preferably wherein said Cas13 protein is Prevotella sp. P5-125 Cas13b, Porphyromonas gulae Cas13b, or Riemerella anatipestifer Cas13b; preferably Prevotella sp. P5-125 Cas13b.

15. (canceled)

16. (canceled)

17. (canceled)

18. The system of claim 1, wherein said Cas13 protein is a Cas13a protein and said Cas13a comprises one or more mutations the two HEPN domains, particularly at position R474 and R1046 of Cas13a protein originating from Leptotrichia wadei or amino acid positions corresponding thereto of a Cas13a ortholog, or wherein said Cas13 protein is a Cas13b protein and said Cas13b comprises a mutation in one or more of positions R116, H121, R1177, H1182, preferably R116A, H121A, R1177A, H1182A of Cas13b protein originating from Bergeyella zoohelcum ATCC 43767 or amino acid positions corresponding thereto of a Cas13b ortholog, or wherein said Cas13 protein is a Cas13b protein and said Cas13b comprises a mutation in one or more of positions R128, H133, R1053, H1058, preferably H133 and H1058, preferably H133A and H1058A, of a Cas13b protein originating from Prevotella sp. P5-125 or amino acid positions corresponding thereto of a Cas13b ortholog.

19. The system of claim 1, said guide sequence comprises a non-pairing Cytosine at a position corresponding to said Adenine resulting in an A-C mismatch in the RNA duplex formed wherein said guide sequence has a length of from about 20 to about 53 nucleotides (nt), preferably from about 25 to about 53 nt, more preferably from about 29 to about 53 nt or from about 40 to about 50 nt capable of forming said RNA duplex with said target sequence.

20. The system of claim 1, wherein the distance between said non-pairing C and the 5′ end of said guide sequence is 20-30 nucleotides.

21. The system of claim 1, wherein said Cas13, preferably Cas13b, is truncated, preferably C-terminally truncated, preferably wherein said Cas13 is a truncated functional variant of the corresponding wild type Cas13, optionally wherein said truncated Cas13b is encoded by nt 1-984 of Prevotella sp. P5-125 Cas13b or the corresponding nt of a Cas13b orthologue or homologue.

22. The system of claim 1, the guide sequence comprises more than one mismatches corresponding to different adenosine sites in the target RNA or wherein two guide molecules are used, each comprising a mismatch corresponding to a different adenosine site in the target RNA.

23. The system of claim 1, wherein said Cas13 protein and optionally said adenosine deaminase protein or catalytic domain thereof comprise one or more heterologous nuclear export signal(s) (NES(s)) or nuclear localization signal(s) (NLS(s)), preferably an HIV Rev NES or MAPK NES, preferably C-terminal.

24. The system of claim 1, said target RNA is within a cell, preferably a eukaryotic cell, most preferably a human or non-human animal cell, or a plant cell.

25. A method of modifying post-translational modification sites on a protein encoded by a target RNA comprising:
contacting the target RNA with the system of claim 1.

26. The method of claim 25, wherein (a), (b), and (c) in the system of claim 1 are delivered or are to be delivered as one or more polynucleotide molecules, as a ribonucleoprotein complex, optionally via particles, vesicles, or one or more viral vectors.

27. The system of claim 1, for use in prophylactic or therapeutic treatment, preferably wherein said target RNA is within a human or animal.

28. The system of claim 1, for use in the treatment or prevention of a disease by inhibiting activation of pathological activation of cell signaling mediated by post-translational modification, preferably phosphorylation.

29. The system of claim 1, wherein said disease is selected from cancer, immunodeficiency diseases or disorders, infectious disease, inflammatory disorders, and neurodegenerative diseases and disorders.

30. The system of claim 1, wherein said modification:
changes the encoded amino acid from a serine, threonine, or tyrosine to an amino acid that cannot be phosphorylated;
inactivates a phosphorylation site of a protein involved in MDM2-p53 signaling pathway, PI3K-Akt signaling pathways, Ras signaling pathways, GPCR signaling pathway, Wnt signaling pathway, Hippo signaling pathway, TGFα signaling pathway, NF-κB signaling pathway, Notch signaling pathway, Hedgehog signaling pathway, and/or cell-cycle signaling pathway;
inactivates a phosphorylation site of a protein involved in MDM2-p53 signaling pathway and PI3K-Akt signaling pathway, preferably the phosphorylation site is on MDM2 at S166, S190, S240, S242, S246, S260, S386, S395, S407, T419, S425, and/or S439, Akt at S473 and/or T308, or MDM4 at S96, Y99, S296, S342, S367, and/or S403; inactivates a phosphorylation site of: IκBα at S32 and/or S36, NIK at T599, p100 at S866, S870, S872, Notch1 at S2152, Raf-1 at S43, S259, S338, and/or Y341, β-catenin at S33, S37, S45, and/or T41, BAD at S122 and/or S136, GSK-3β at S9, RelA(p65) at S910, YAP at S61, S109, S127, S164, S381, and/or S384, or TAZ at S66, S89, S117, and/or S311, YAP at S127, Caspase-9 at S196, MLK3 at S647, and ASK1 at S83, CREB at S133, FOXO1 at S256, S319, and T24, FOXO2 at S32, S253, and S315, and FOXO4 at S193, S258, and T28, and IKKa at T23;
inactivates at least two or at least three phosphorylation sites of the same protein; inactivates a phosphorylation site of at least two or at least three proteins involved in the same signaling pathway;
modulates at least two or at least three different signaling pathways selected from Akt-MDM2 signaling pathway, Ras signaling pathways, GPCR signaling pathway, Wnt signaling pathway, Hippo signaling pathway, TGFβ signaling pathway, NF-κB signaling pathway, Notch signaling pathway, Hedgehog signaling pathway, and/or cell-cycle signaling pathway; or
modulates at least one p53-dependent signaling pathway and at least one p53-independent signaling pathway.

31. (canceled)

33. (canceled)

34. The system of claim 1, wherein the disease is a p53 WT lymphoma.

35. (canceled)

36. The system of claim 1, wherein at least two or at least three different guide molecules are used to target the at least two or at least three phosphorylation sites of the same protein.

37. The system of claim 1, wherein a single guide molecule is used to target the at least two or at least three phosphorylation sites of the same protein.

38. (canceled)

39. (canceled)

40. (canceled)

41. A cell comprising the system of claim 1, or progeny of said modified cell.

42. The cell of claim 41 or a progeny thereof, wherein said cell is a eukaryotic cell, preferably a human or non-human animal cell, optionally a therapeutic T cell or an antibody-producing B-cell, or wherein said cell is a plant cell.

43. A non-human animal or plant comprising said modified cell of claim 41 or a progeny thereof.

44. (canceled)

45. A modified cell according to claim 41 for use in therapy, preferably cell therapy.

46. A composition comprising a library of at least 100, at least 1000, or at least 10,000 different guide molecules, wherein each guide molecule is capable of forming a complex with a Cas13 protein and directs said complex to bind a target RNA sequence encoding a phosphorylation site of a protein involved in a cell signaling pathway.

47. A composition comprising a population of cells obtainable or obtained by:
(a) introducing the library of guide molecules of claim 46 into at least 100, at least 1,000 or at least 10,000 cells, preferably at an average ratio of no more than one guide molecule per cell, the cells each expressing a catalytically inactive (dead) Cas13 protein and an adenosine deaminase protein or catalytic domain thereof, wherein the adenosine deaminase protein or catalytic domain thereof is covalently or non-covalently linked to the dead Cas13 protein or is adapted to bind the guide molecule after introduction thereof, or
(b) introducing the library of guide molecules of claim 46 into at least 100, at least 1,000 or at least 10,000 cells, preferably at an average ratio of no more than one guide molecule per cell, and simultaneously or sequentially introducing to the cells one or more nucleic acid sequences encoding the catalytically inactive (dead) Cas13 protein and the adenosine deaminase protein or catalytic domain thereof.

48. A method for identifying a phosphorylation site associated with a target phenotype, comprising:
selecting cells from the population of cells of claim 47 based on a target phenotype, wherein optionally the population of cells are cancer cells and the target phenotype is apoptosis, preferably in response to a cancer drug; and
determining relative representation of the guide molecules present in the selected cells and identifying a phosphorylation site associated with the target phenotype.

49. A method for detecting hepatitis B (HBV) associated diffuse large B-cell lymphoma (DLBCL) comprising detecting one or more of TMSB4X, FAS, BCL6, KLF2, UBE2A, SGK1, CD70, BIG2, PIM1, CXCR4, DTX1, EBF1, TNFRSF14, TP53, ZFP36L1, CDK14, IKZF3, and TP73 in a cell comprising the system of claim 1.

50. A method for treating HBV-associated DLBCL comprising introducing the system of claim 1 to a subject in need thereof; and targeting
TP65, TP73, TP53, or a combination thereof;
CDKN1B, BCL6, KLF2;
CBP/p300; and/or
CD27-CD70 pathway or TNFRSF14-TNFSF14 pathway.
